(19) United States
(12) Patent Application Publication
(10) Pub. No.: US 2019/0185877 A1
(43) Pub. Date: Jun. 20, 2019

(54) ANTI-MICROBIAL PROTEINS

(71) Applicant: Monsanto Technology LLC, St. Louis, MO (US)

(72) Inventors: Patrick Boyle, St. Louis, MO (US); David Caldwell, St. Louis, MO (US); Jaishree Chittoor, Wildwood, MO (US); Jintai Huang, Chesterfield, MO (US); Susanne Kjemtrup, St. Louis, MO (US); Gerrit Segers, Wildwood, MO (US)

(21) Appl. No.: 16/070,733

(22) PCT Filed: Jan. 19, 2017
(86) PCT No.: PCT/US2017/014153

§ 371 Date: Jul. 17, 2018

Related U.S. Application Data
(60) Provisional application No. 62/280,597, filed on Jan. 19, 2016.

(51) Int. Cl. C12N 15/82; C07K 14/415

(52) U.S. Cl. CPC C12N 15/8282; C07K 14/415

(57) ABSTRACT

The disclosure provides polynucleotide molecules encoding novel defensins conferring increased pest tolerance and/or pesticidal activity when expressed in a plant, and recombinant DNA constructs and vectors comprising these molecules. Methods of making transgenic plants comprising recombinant defensin-encoding polynucleotide molecules and constructs, and transgenic plants, plant parts and seeds produced by these methods are provided. Compositions comprising one or more novel defensins of the disclosure are also provided having pesticidal and/or anti-microbial activity, as well as methods of their use.

### REFERENCE TO RELATED APPLICATION

[0001] This application claims the benefit of U.S. Provisional Application No. 62/280,597, filed Jan. 19, 2016, which is herein incorporated by reference in its entirety.

### FIELD OF THE INVENTION

[0002] The invention relates to the field of agricultural biotechnology. More specifically, the invention relates to nucleotide and polypeptide molecules, DNA constructs, and methods for producing plants with improved microbial pathogen or pest tolerance, as well as transgenic plants with improved pesticidal and/or fungicidal activity. The invention further relates to pesticidal and/or fungicidal compositions.

### INCORPORATION OF SEQUENCE LISTING

[0003] A sequence listing contained in the file named “MONS388WO_ST25.txt” which is 592 KB (measured in MS-Windows®) and created on Jan. 18, 2017, is filed electronically herewith and incorporated by reference in its entirety.

### BACKGROUND

[0004] Control of fungal pathogens and other disease-causing microbes that affect plants is one of the major difficulties facing the agricultural and horticultural industries. Although chemical agents have been successfully employed, a range of environmental and regulatory concerns is associated with the continued use of chemical approaches to control plant pests. Furthermore, with increased use of chemical pesticides comes increased resistance to these chemicals in pathogen and pest populations. Thus, further investigation to discover alternative mechanisms of providing resistance in plants to pathogens, such as insects, nematodes, microorganisms, fungi, bacteria and viruses, is needed.

### SUMMARY

[0005] In one aspect, the invention provides a recombinant DNA construct comprising a nucleic acid sequence encoding a multi-domain defensin polypeptide comprising a first defensin region connected to a second defensin region by a linker region, the first defensin region and the second defensin region each comprising a gamma-thionin domain, wherein the nucleic acid sequence encoding the defensin polypeptide is operably linked to a promoter functional in a plant cell.

[0006] In another aspect, the invention provides a recombinant DNA construct comprising a nucleic acid sequence encoding a single domain defensin polypeptide.

[0007] For the multi-domain defensin, in some embodiments, the first defensin region is heterologous with respect to the second defensin region or the linker region, while in other embodiments the first defensin region or the second defensin region is heterologous with respect to the linker region. In certain embodiments, the first defensin region is identical to the second defensin region. In other embodiments, the first defensin region is different from the second defensin region. In certain embodiments, the promoter may be a heterologous promoter. In further embodiments, each defensin domain comprises at least 6 cysteine residues. The multi-domain defensin may be at least 90 amino acids in length. Each defensin domain may comprise: (a) between 5 and 10 cysteine residues; (b) a Pfam gamma-thionin domain (PF00304) with an E-value cutoff of 1e⁻³; or (c) a Cys-stabilized αβ (CSαβ) motif.

[0008] In certain embodiments, the first defensin region or the second defensin region of a multi-domain defensin comprises a polypeptide having at least 80% identity, at least 90% identity, at least 95% identity, or at least 97% identity to an amino acid sequence selected from the group consisting of: SEQ ID NOs: 559-662, or a polypeptide having an amino acid sequence selected from the group consisting of: SEQ ID NOs: 559-662. In some embodiments, the linker region comprises a polypeptide having at least 80% identity, at least 90% identity, at least 95% identity, or at least 97% identity to an amino acid sequence selected from the group consisting of: SEQ ID NOs: 153-202, or a polypeptide comprising an amino acid sequence selected from the group consisting of: SEQ ID NOs: 153-202. In other embodiments, the multi-domain defensin polypeptide comprises an amino acid sequence having at least 80% identity, at least 90% identity, at least 95% identity, or at least 97% identity to an amino acid sequence selected from the group consisting of: SEQ ID NOs: 52-102, 329-454, and 1156, or a polypeptide comprising an amino acid sequence selected from the group consisting of SEQ ID NOs: 52-102, 329-454 and 1156. In further embodiments, the first defensin region or the second defensin region of a multi-domain defensin comprises an amino acid sequence having at least 80% identity, at least 90% identity, at least 95% identity, or at least 97% identity to a defensin sequence portion of an amino acid sequence selected from the group consisting of: SEQ ID NOs: 1054-1152 and 1154, or an amino acid sequence selected from the group consisting of SEQ ID NOs: 1054-1152 and 1154. In further embodiments, the multi-domain defensin polypeptide encoded by nucleic acid sequence further comprises an N-terminal transit signal sequence having at least 80% identity, at least 90% identity, at least 95% identity, or at least 97% identity to an amino acid sequence selected form the group consisting of SEQ ID NOs: 809-954.

[0009] In certain embodiments, the defensin polypeptide comprises an amino acid sequence having at least 80% identity, at least 90% identity, at least 95% identity, or at least 97% identity to a defensin sequence portion of an amino acid sequence selected from the group consisting of: SEQ ID NOs: 1054-1152 and 1154, or an amino acid sequence selected from the group consisting of: SEQ ID NOs: 1054-1152 and 1154. In further embodiments, the multi-domain defensin polypeptide encoded by nucleic acid sequence further comprises an N-terminal transit signal sequence having at least 80% identity, at least 90% identity, at least 95% identity, or at least 97% identity to an amino acid sequence selected form the group consisting of: SEQ ID NOs: 809-954.

[0010] In another aspect, the invention provides a synthetic promoter as set forth in SEQ ID NO: 1158 to express single domain defensin or multi-domain defensin in plant cells.

[0011] In another aspect, the invention provides a plant, seed, plant tissue, plant part, or cell comprising a recombinant DNA construct provided herein or comprising the multi-domain defensin polypeptide encoded by a recombinant DNA construct provided herein. The plant, seed, plant tissue, plant part, or cell may exhibit tolerance or activity against at least one plant fungal pathogen species within one or more of the following genera of fungi: Fusarium, Collectotrichum, Stenocarpella, and/or Phakopsora. The plant, seed, plant tissue, plant part, or cell may exhibit tolerance or activity against one or more of the following fungal species: Fusarium graminearum, Fusarium verticilloides, Collectotrichum graminicola, Stenocarpella maydis, and/or Phakopsora pachyrhizi.

[0012] In another aspect, the invention provides a microorganism comprising a recombinant DNA construct provided herein, or a DNA molecule or vector comprising a recombinant DNA construct provided herein. The DNA molecule or vector may comprise a polynucleotide sequence having at least 70% identity, at least 85% identity, at least 90% identity, at least 95% identity, or at least 97% identity to a nucleotide sequence selected from the group consisting of: SEQ ID NOs: 1-51, 203-328, 955-1053 and 1155, or a polynucleotide sequence having a nucleotide sequence selected from the group consisting of: SEQ ID NOs: 1-51, 203-328, 955-1053, and 1155.

[0013] The invention further provides a method for conferring fungal pathogen tolerance or resistance to a plant, seed, cell, or plant part comprising expressing in said plant, seed, cell, or plant part the single domain defensin or the multi-domain defensin polypeptide encoded by the recombinant DNA construct disclosed herein. The invention further provides methods for expressing the recombinant DNA constructs of the invention in a plant cell or microorganism to produce a multi-domain defensin polypeptide, for example such that the multi-domain defensin polypeptide accumulates in a plant cell at a higher level relative to a single domain (1D) defensin control. The invention further provides a method for producing a transgenic plant with resistance or tolerance to a fungal pathogen comprising transforming a plant cell or tissue with the recombinant DNA molecule or vector provided herein, and regenerating a transgenic plant.

[0014] In another aspect, the invention provides a recombinant DNA construct comprising a nucleic acid sequence encoding a defensin having at least 80% identity to an amino acid sequence selected from the group consisting of SEQ ID NOs: 1054-1152, wherein the nucleic acid sequence encoding the defensin polypeptide is operably linked to a promoter functional in a plant cell. In certain embodiments, the defensin polypeptide has an amino acid sequence selected from the group consisting of SEQ ID NOs: 1054-1152. In further embodiments, the promoter comprises a nucleotide sequence as set for in SEQ ID NO: 1158.

[0015] The invention further provides a plant, seed, plant tissue, plant part, or cell comprising a recombinant DNA construct described herein. In some embodiments, the plant, seed, plant tissue, plant part, or cell has tolerance or activity against at least one plant fungal pathogen selected from the group consisting of Fusarium, Collectotrichum, Stenocarpella, and Phakopsora, for example at least one fungal species selected from the group consisting of Fusarium graminearum, Fusarium verticilloides, Collectotrichum graminicola, Stenocarpella maydis, and Phakopsora pachyrhizi.

[0016] In a further aspect, the invention provides methods of producing a transgenic plant with tolerance to a fungal pathogen comprising transforming a plant cell or tissue with the recombinant DNA molecule or vector described herein, and regenerating a transgenic plant.

### BRIEF DESCRIPTION OF THE SEQUENCES

[0017] SEQ ID NOs: 1-51: Nucleotide sequences of native multi-domain defensins.
SEQ ID NOs: 52-102: Polypeptide sequences of native multi-domain defensins.
SEQ ID NOs: 103-152: Nucleotide sequences of linker regions from multi-domain defensins.
SEQ ID NOs: 153-202: Polypeptide sequences of linker regions from multi-domain defensins.
SEQ ID NOs: 203-328: Nucleotide sequences of several synthetic multi-domain defensins.
SEQ ID NOs: 329-454: Polypeptide sequences of several synthetic multi-domain defensins.
SEQ ID NOs: 455-558: Nucleotide sequences of defensin regions from multi-domain defensins.
SEQ ID NOs: 559-662: Polypeptide sequences of defensin regions from multi-domain defensins.
SEQ ID NOs: 663-808: Nucleotide sequences of transit signals (TS) of multi-domain defensins.
SEQ ID NOs: 809-954: Polypeptide sequences of TS of multi-domain defensins.
SEQ ID NOs: 955-1053: Nucleotide sequences of 1D defensins.
SEQ ID NOs: 1054-1152: Polypeptide sequences of 1D defensins.
SEQ ID NO: 1153: Nucleotide sequence of MEDsa.AFPm1.
SEQ ID NO: 1154: Polypeptide sequence of MEDsa.AFPm1.
SEQ ID NO: 1155: Nucleotide sequence of a synthetic heterodimeric defensin.
SEQ ID NO: 1156: Polypeptide sequence of a synthetic heterodimeric defensin.
SEQ ID NO: 1157: Nucleotide sequence of codon optimized PINSY.AFP1.
SEQ ID NO: 1158: Nucleotide sequence of a synthetic regulatory element for controlling transgene expression.

### BRIEF DESCRIPTION OF THE DRAWINGS

[0018] FIG. 1 shows: (Top) a diagram depicting the domain configuration of two single domain (1D) defensins and four homodimeric synthetic two-domain (2D) defensins derived from the naturally occurring single domain defensins Coix22 and MtDef4. L1 and L2 represent different 2D linker regions described herein. The N-terminal transit signal (TS) sequences are also shown. (Bottom) a diagram depicting the domain configuration of a heterodimeric synthetic 2D defensin derived from Coix22 and AMAru.AFP10. L3 represent a 2D linker region described herein.

[0019] FIG. 2 shows: Relative RNA and protein expression levels of several homodimeric 2D defensins as compared to those levels of the corresponding 1D defensin.

### DETAILED DESCRIPTION

[0020] Plant diseases caused by fungal or other microbial pathogens can severely impact yield in crop plants, resulting in millions of tons of grain loss annually. Fungal plant diseases can result from a combination of several pathogens, and nearly every field of crop plants may experience fungal disease pressure to some extent. The development of effective methods of fungal control has been hindered by a lack of available agents with activity against different fungal pathogens, and/or agents which can be effectively combined with existing methods for fungal control. Yield loss due to fungal disease in agricultural plants therefore remains a significant problem.

[0021] The invention provides novel anti-microbial peptides (AMPs) comprising defensin or defensin-like proteins, including multi-domain defensin proteins, capable of conferring pest resistance or tolerance and/or fungicidal activity to plants. Novel polynucleotide molecules and sequences encoding defensin or defensin-like proteins, as well as recombinant DNA constructs comprising these novel defensin-encoding polynucleotide sequences, are also provided. In addition, methods are provided for producing plants with increased pest control or pesticidal activity by expressing in a plant a polynucleotide of the invention encoding a defensin or defensin-like protein, such as by transforming a plant or plant cell with a recombinant DNA construct comprising a polynucleotide sequence encoding a defensin or defensin-like protein, and transgenic plants or plant cells produced by these methods and comprising a defensin-encoding DNA construct of the invention. Pesticidal and plant health compositions and methods are also contemplated for administering or applying a defensin or defensin-like protein(s) of the invention to a plant, a plant growth medium or soil associated with the plant, or a plant part or seed.

[0022] The invention provides novel polynucleotide and polypeptide sequences of defensins or defensin-like protein molecules including multi-domain defensins, and the use of these sequences and molecules for generating pest resistance or tolerance in plants. As used herein, “tolerance” or “improved tolerance” in a plant to a pest or pathogen is an indication that the plant is less affected by the pest or pathogen with respect to yield, survivability and/or other relevant agronomic measures, compared to a less resistant, more “susceptible” plant. “Resistance” or “improved resistance” in a plant to a pest or pathogen is an indication that the plant is more able to reduce the effect of the pest or pathogen than a non-resistant or less resistant plant. The defensins described herein may be introduced into various plant species to confer anti-fungal and/or anti-microbial activity, and thus resistance or tolerance to one or more plant pests or pathogens. The defensins and defensin-like molecules disclosed herein may be introduced and expressed in a plant or plant cell to confer the anti-fungal and/or anti-microbial activity to the plant or plant cell. According to embodiments of the invention, polynucleotides, constructs and proteins of the invention may confer resistance or tolerance to, and activity against, one or more fungal pathogens, including a Fusarium, Colletotrichum, Stenocarpella, and/or Phakopsora species, such as Fusarium graminearum, Fusarium verticilloides, Colletotrichum graminicola, Stenocarpella maydis, and/or Phakopsora pachyrhizi. In addition to having anti-fungal activity, constructs and proteins of the invention may confer resistance or tolerance to, and activity against, other microbial plant pathogen(s) and/or plant pest(s), such as oomycetes, bacteria, insects, nematodes, etc.

[0023] Defensins or defensin-like proteins or polypeptides, hereinafter referred to jointly as defensins, are cysteine-rich cationic peptides, many of which exhibit inhibitory activity against a variety of microbial plant pathogens and agricultural pests. Single domain (1D) defensins are small globular proteins or peptide molecules, typically comprising approximately 50 amino acid (aa) residues that may be highly variable in sequence. Despite this variability, defensin peptides do share a gamma-thionin core consensus sequence (a gamma-thionin domain) and contain about 6-8 cysteine residues that may form disulfide bonds with protein folding. The three-dimensional structure of 1D defensins has been described as a Cys-stabilized αβ motif (CSαβ) having three anti-parallel β-sheets and one α-helix stabilized by multiple disulfide bridges formed by conserved cysteine residues (typically four disulfide bridges formed by eight conserved cysteine residues). See, e.g., Carvalho, A O et al., Peptides 30: 1007-1020 (2009); and Thomma, B et al., Planta 216: 193-202 (2002), the entire contents and disclosures of which are incorporated herein by reference. Defensins may further comprise an N-terminal transit signal (TS) sequence of variable length from only a few amino acids up to 20-30 amino acids, and/or a C-terminal extension sequence of variable length up to 35-30 amino acids when present. The N-terminal TS sequence on a defensin pro-protein may play a role in the targeting and/or export of the mature defensin protein into the apoplastic space or other sub-cellular compartment. However, the TS sequence may generally become cleaved and removed from the remainder of the defensin co/post-translationally to produce a mature defensin protein or peptide without the TS sequence. Some defensins may also have a C-terminal extension sequence that may also play a variety of roles in a plant cell and/or become cleaved from a mature defensin protein or peptide.

[0024] In one aspect, the invention provides several multi-domain (MD) defensins from plants, including two-domain (2D) and four-domain (4D) defensins, comprising two or more defensin regions or domains connected or bridged together by one or more linker regions, in addition to N-terminal TS sequences and/or C-terminal extension sequences. Each of the defensin regions of a 2D or MD defensin may also be referred to as a “defensin component” of the 2D or MD defensin. Thus, polypeptide sequences of the invention may comprise one of these multi-domain defensin proteins or polypeptides. Examples of multi-domain defensins including 2D defensins that may be used according to embodiments of the invention include those provided herein as SEQ ID NOs: 52-102. Further provided are polynucleotide molecules and constructs encoding one of these multi-domain defensins, such as those provided as SEQ ID NOs: 1-51. These MD defensin-encoding polynucleotides may be used according to embodiments of the invention to confer pesticidal and/or anti-fungal activity when expressed in a plant. Multi-domain defensin proteins of the invention may also optionally comprise an N-terminal transit signal (TS) sequence, such as one of SEQ ID NOs: 809-954, and/or a C-terminal sequence, such as one identified by annotation in Table 2 below for SEQ ID NOs: 101 and 102.

[0025] In one aspect, the invention provides several single domain (1D) defensins from plants that have pesticidal and/or anti-fungal activity, as well as polynucleotides encoding these 1D defensins. Thus, embodiments of the invention include polynucleotides and constructs encoding these 1D defensins for expression in a plant, or at least comprising a defensin sequence portion of these 1D defensins as identified herein. Examples of 1D defensins that are used according to embodiments of the invention include one or more of those provided herein as SEQ ID NOs: 1054-1127 and 1129-1152, and examples of polynucleotide sequences encoding these 1D defensins include one or more of those provided herein as SEQ ID NOs: 955-1028 and 1030-1053. 1D defensins of the invention may further include those comprising a defensin component of a 2D or MD defensin identified herein, such as one or more of those provided herein as SEQ ID NOs: 559-662, as well as polynucleotides sequences encoding these defensin components, such as one or more of those provided herein as SEQ ID NOs: 455-558. It is further contemplated that 1D defensins of the invention may comprise polypeptide and polynucleotide sequences having a relaxed sequence identity relative to the above identified sequences. For example, a 1D defensin may have a polypeptide sequence that is at least 80%, at least 85%, at least 90%, at least 95%, at least 97%, at least 98%, at least 99%, or 100% identical to at least a defensin sequence portion of one of SEQ ID NOs: 1054-1127 or 1129-1152, and/or a 1D defensin may be encoded by a polynucleotide sequence that is at least 80%, at least 85%, at least 90%, at least 95%, at least 97%, at least 98%, at least 99%, or 100% identical to at least a defensin sequence portion of one of SEQ ID NOs: 955-1028 or 1030-1053. A 1D defensin may further comprise a fragment comprising at least 25, least 50, at least 75, or at least 100, contiguous amino acids of a defensin sequence portion of one of SEQ ID NOs: 1054-1127 or 1129-1152, and/or a 1D defensin may be encoded by a polynucleotide sequence that is fragment comprising at least 25, at least 50, at least 75, or at least 100 contiguous nucleotides of a defensin sequence portion of one of SEQ ID NOs: 955-1028 or 1030-1053. In some embodiments, a fragment has the activity of the full-length defensin sequence portion of one of SEQ ID NOs: 1054-1127 or 1129-1152, or encoded by one of SEQ ID NOs: 955-1028 or 1030-1053. The 1D defensin-encoding polynucleotides and constructs may be used according to embodiments of the invention to confer pesticidal and/or anti-fungal activity when introduced and expressed in a plant.

[0026] In addition to newly discovered single and multi-domain defensins from plants, methods and compositions are provided for the construction, synthesis and expression of synthetic multi-domain defensin proteins comprising heterologous or non-naturally occurring combinations of two or more defensin regions or domains and one or more linker region(s) connecting or bridging the two or more defensin regions together, as well as polynucleotides encoding these synthetic multi-domain defensins. For example, each of the defensin regions of a synthetic multi-domain defensin may comprise a defensin sequence portion of a 1D defensin or a defensin component of a 2D or MD defensin, as identified herein. These synthetic multi-domain defensin proteins may thus be referred to as chimeric multi-domain defensins comprising defensin region(s) and/or linker region(s) that are heterologous in their origin. In addition to their novel structure, synthetic multi-domain defensins may also have one or more novel properties or characteristics, such as increased accumulation when expressed in a plant cell and/or new, altered or enhanced anti-fungal and/or pesticidal activity, relative to existing or known defensins, such as 1D defensins comprising one of their defensin components. A synthetic multi-domain defensin of the invention may comprise a heterologous or non-naturally occurring combination of a first defensin domain or region, a second defensin domain or region, and a linker region, wherein the first defensin region and the second defensin region are linked or connected to each other by the linker region. For example, a synthetic 2D defensin of the invention can comprise these regions in the following order (in the N-terminal to C-terminal direction): (i) first defensin region, (ii) linker region, and (iii) second defensin region. Synthetic multi-domain defensins may further comprise additional defensin region(s) connected by additional linker region(s). Furthermore, a 3D defensin may have the following order: (i) first defensin region, (ii) first linker region, (iii) second defensin region, (iv) second linker region, and (v) third defensin region, whereas a 4D defensin may additionally comprise a third linker region and a fourth defensin region with the third linker region being between the third and fourth defensin regions, and so on.

[0027] Accordingly, synthetic multi-domain defensin proteins or polypeptides of the invention may comprise combinations of two or more defensin domains or regions, each of the defensin region(s) comprising of one of the sequences provided herein as SEQ ID NOs: 559-662 and/or a defensin sequence portion of one of SEQ ID NOs: 1054-1152 and/or 1154, wherein the two or more defensin regions are linked or joined together by linker region(s), such as one or more of those provided herein as SEQ ID NOs: 153-202. For example, the first defensin region of a synthetic 2D defensin may comprise one of SEQ ID NOs: 559-662, and/or a defensin sequence portion of one of SEQ ID NOs: 1054-1152 and/or 1154, the second defensin region may comprise one of SEQ ID NOs: 559-662 and/or a defensin sequence portion of one of SEQ ID NOs: 1054-1152 and/or 1154, which may be the same as, or different than, the first defensin region, and the linker region connecting the first and second defensin regions may be one of SEQ ID NOs: 153-202.

[0028] In one embodiment of the invention, a “defensin sequence portion” shall refer to the sequence portion of a 1D defensin or defensin-like protein that excludes the N-terminal TS sequence and the C-terminal extension sequence (if present), as well as a polynucleotide sequence encoding the defensin sequence portion of a defensin or defensin-like protein. See, e.g., Table 15 below providing annotation for the defensin sequence portion of 1D defensin sequences. However, according to some embodiments, a defensin region near the N-terminus of a synthetic 2D or MD protein may retain its native TS sequence, and/or a defensin region near the C-terminus of the synthetic 2D or MD protein may retain its native C-terminal extension. Synthetic multi-domain defensins of the invention may also optionally comprise an N-terminal transit signal (TS) sequence, such as one of SEQ ID NOs: 809-954, and/or a C-terminal sequence, such as one identified by annotation in Table 2 below for SEQ ID NOs: 101 and 102. For example, synthetic multi-domain defensins of the invention may comprise one or more of those provided herein as SEQ ID NOs: 329-454 and 1156.

[0029] Polynucleotides of the invention may include sequences encoding synthetic multi-domain defensins. These polynucleotides may comprise combinations of two or more polynucleotide sequences encoding defensin domains or regions, each of these polynucleotide sequences encoding a defensin region may comprise a polynucleotide sequence provided herein as SEQ ID NOs: 455-558 or a defensin sequence portion of one of the polynucleotide sequences provided herein as SEQ ID NOs: 955-1053 and/or 1153, linked or joined together by a polynucleotide sequence(s) encoding a linker region(s), such as one or more of those provided herein as SEQ ID NOs: 103-152. For example, the sequence encoding the first defensin region of a synthetic 2D defensin may comprise one of SEQ ID NOs: 455-558 or a defensin sequence portion of one of the polynucleotide sequences provided herein as SEQ ID NOs: 955-1053 and/or 1153, the sequence encoding the second defensin region of the synthetic 2D defensin may comprise one of SEQ ID NOs: 455-558 or a defensin sequence portion of one of the polynucleotide sequences provided herein as SEQ ID NOs: 955-1053 and/or 1153, which may be the same as or different than the sequence encoding the first defensin region, and the sequence encoding the linker region of the synthetic 2D defensin connecting the first and second defensin regions may be one of SEQ ID NOs: 103-152. Polynucleotides of the invention may also optionally comprise sequences encoding a N-terminal targeting signal (TS) sequence, such as one of SEQ ID NOs: 663-808, and/or a C-terminal sequence, such as one of the sequences identified by annotation in Table 1 herein for SEQ ID NOs: 50 and 51. For example, polynucleotides encoding synthetic multi-domain defensins of the invention may comprise one or more of those provided herein as SEQ ID NOs: 203-328 and 1155.

[0030] Multi-domain defensin proteins of the invention may further include variants and homologues of the native and synthetic defensin sequences provided herein. According to some embodiments, multi-domain defensin variants may comprise one or more mutations, deletions, insertions, etc., relative to a native or synthetic defensin or multi-domain defensin sequence, or other engineered defensin-like sequences. Multi-domain defensin proteins or polypeptides of the invention may comprise combinations of two or more defensin domains or regions, wherein one or more of those defensin regions has a relaxed sequence identity relative to one or identity to one or more of SEQ ID NOs: 559-662, and/or a defensin sequence portion of one or more of SEQ ID NOs: 1054-1152 and/or 1154. Each defensin region of a multi-domain defensin may be at least 80% identical, at least 85% identical, at least 90% identical, at least 95% identical, at least 97% identical, at least 98% identical, at least 99% identical, or 100% identical to one of SEQ ID NOs: 559-662 and/or a defensin sequence portion of one of SEQ ID NOs: 1054-1152 and/or 1154. A defensin region of a multi-domain defensin may further comprise a fragment comprising at least 25, at least 50, at least 75, or at least 100, contiguous amino acids of one of SEQ ID NOs: 1054-1152 and/or 1154. In some embodiments, a fragment has the activity of the full-length defensin region of one of SEQ ID NOs: 1054-1154. Each of the linker domain(s) or region(s) of a multi-domain defensin protein may also have a relaxed sequence identity relative to SEQ ID NOs: 153-202. Each linker region of a multi-domain defensin may be at least 80% identical, at least 85% identical, at least 90% identical, at least 95% identical, at least 97% identical, at least 98% identical, at least 99% identical, or 100% identical to one of SEQ ID NOs: 153-202. Indeed, multi-domain defensin proteins of the invention may comprise a polypeptide sequence that is at least 80% identical, at least 85% identical, at least 90% identical, at least 95% identical, at least 97% identical, at least 98% identical, at least 99% identical, or 100% identical to any one of SEQ ID NOs: 52-102, 329-454, or 1156. A multi-domain defensin protein may further comprise a fragment comprising at least 50, at least 75, at least 100, at least 125, at least 150, at least 175, or at least 200 contiguous amino acids of any one of SEQ ID NOs: 52-102, 329-454 or 1156. In some embodiments, a fragment has the activity of SEQ ID NOs: 52-102, 329-454, or 1156. However, a linker region of a multi-domain may also be highly variable in sequence and length with little or no sequence identity of similarity to SEQ ID NOs: 153-202. A linker region may also comprise two or more linker sequences arranged in tandem, wherein each of the linker sequences may comprise one of SEQ ID NOs: 153-202, a polypeptide sequence having a relaxed sequence identity relative to SEQ ID NOs: 153-202, or other sequence.

[0031] The N-terminal targeting signal (TS) and/or a C-terminal sequences of a multi-domain defensin (if present) may each also have relaxed sequence identity relative to the sequences provided herein. The N-terminal targeting signal (TS) sequence may be at least 80% identical, at least 85% identical, at least 90% identical, at least 95% identical, at least 97% identical, at least 98% identical, at least 99% identical, or 100% identical to one of SEQ ID NOs: 809-954. The C-terminal sequence may be at least 80% identical, at least 85% identical, at least 90% identical, at least 95% identical, at least 97% identical, at least 98% identical, at least 99% identical, or 100% identical to one of the C-terminal sequences identified by annotation in Table 2 for SEQ ID NOs: 101 and 102. According to some embodiments, however, the N-terminal and/or C-terminal sequences of a multi-domain defensin may instead be dissimilar or have a lower sequence identity relative to the sequences provided herein.

[0032] Polynucleotides of the invention may comprise sequences encoding multi-domain defensin proteins with relaxed sequence identity relative to the sequences provided herein. Polynucleotides encoding these multi-domain defensins may comprise combinations of two or more sequences encoding defensin domains or regions, wherein one or more of the polynucleotide sequences encoding these defensin regions have a relaxed sequence identity relative to one or more of SEQ ID NOs: 455-558 and/or a defensin sequence portion of one or more of SEQ ID NOs: 955-1053 and/or 1153. Accordingly, polynucleotide sequences encoding each defensin region of a multi-domain defensin may be at least 70% identical, at least 75% identical, at least 80% identical, at least 85% identical, at least 90% identical, at least 95% identical, at least 97% identical, at least 98% identical, at least 99% identical, or 100% identical to one of SEQ ID NOs: 455-558 and/or a defensin sequence portion of one of SEQ ID NOs: 955-1053 and/or 1153. A defensin region of a multi-domain defensin may further comprise a fragment comprising at least 50, at least 75, at least 100, at least 125, at least 150, at least 175, or at least 200 contiguous nucleotides of any one of SEQ ID NOs: 455-558 and/or a defensin sequence portion of one of SEQ ID NOs: 955-1053 and/or 1153. In some embodiments, a fragment encodes a protein having the activity of a protein encoded by SEQ ID NOs: 455-558 and/or a defensin sequence portion of one of SEQ ID NOs: 955-1053 and/or 1153. The polynucleotide sequences encoding the linker domain(s) or region(s) of a multi-domain defensin protein may also have a relaxed sequence identity relative to SEQ ID NOs: 103-152. Accordingly, the polynucleotide sequence encoding a linker region of a multi-domain defensin may be at least 70% identical, at least 75% identical, at least 80% identical, at least 85% identical, at least 90% identical, at least 95% identical, at least 97% identical, at least 98% identical, at least 99% identical, or 100% identical to one of SEQ ID NOs: 103-152. Indeed, polynucleotides encoding multi-domain defensin proteins of the invention may comprise a polynucleotide sequence that is at least 70% identical, at least 75% identical, at least 80% identical, at least 85% identical, at least 90% identical, at least 95% identical, at least 97% identical, at least 98% identical, at least 99% identical, or 100% identical to any one of SEQ ID NOs: 1-51, 203-328, or 1155. However, a polynucleotide sequence encoding the linker region(s) of a multi-domain may also be highly variable in sequence and length with little or no sequence identity of similarity to SEQ ID NOs: 103-152. As mentioned above, a linker region may also comprise two or more linker sequences arranged in tandem, wherein each of the linker sequences may comprise one of SEQ ID NOs: 103-152, a polynucleotide sequence having a relaxed sequence identity relative to SEQ ID NOs: 103-152, or other sequence.

[0033] If present, polynucleotide sequences encoding the N-terminal targeting signal (TS) sequence and/or the C-terminal sequence of a multi-domain defensin may also have a relaxed sequence identity relative to sequences provided herein. The polynucleotide sequence encoding the N-terminal targeting signal (TS) sequence of a multi-domain defensin may be at least 70% identical, at least 75% identical, at least 80% identical, at least 85% identical, at least 90% identical, at least 95% identical, at least 97% identical, at least 98% identical, at least 99% identical, or 100% identical to one SEQ ID NOs: 663-808. The polynucleotide sequence encoding the C-terminal sequence of a multi-domain defensin may be at least 70% identical, at least 75% identical, at least 80% identical, at least 85% identical, at least 90% identical, at least 95% identical, at least 97% identical, at least 98% identical, at least 99% identical, or 100% identical to one of the C-terminal sequences identified in Table 1 for SEQ ID NOs: 50 and 51.

[0034] According to some embodiments, however, the N-terminal and/or C-terminal sequences of a multi-domain defensin may instead be dissimilar or have a lower sequence identity relative to the sequences provided herein.

[0035] For purposes of the invention, the percent identity of two polynucleotide or polypeptide sequences may be determined by first optimally aligning the two sequences and then determining the percentage of nucleotide bases or amino acid residues that are the same between the two sequences over a comparison window, which may be over the full length of one of the two sequences. An optimal alignment is defined as a best fit or match of the two sequences with resistance or tolerance for any gaps in the alignment. A number of computerized programs and algorithms are known in the art for achieving an optimal alignment of two or more sequences (GAP, BESTFIT, FASTA, BLAST, Smith-Waterman). When optimally aligned, the percent identity of a subject sequence to a reference sequence is determined by taking the number of matched or identical bases or amino acids between the two sequences, dividing by the length of the reference sequence, and then multiplying the quotient by 100%.

[0036] Multi-domain defensins of the invention may further have characteristic structural features, which may be related to their pesticidal and anti-fungal activity. These features may allow for the identification of additional defensins that may be used in designing novel multi-domain defensins. For example, multi-domain defensin proteins of the invention may be defined as comprising the following features: (a) a Pfam gamma-thionin domain (PF00304), as determined by a search of the Pfam protein families database using an E-value cutoff of 1e⁻³ (Finn, et al. Nucleic Acids Research, 2014, Database Issue 42:D222-D230); (b) polypeptides comprising more than 8 cysteine residues; and (c) polypeptides comprising two or more gamma-thionin domains (GXCXₙC) separated by a polypeptide linker sequence, wherein n is 3-22 amino acids in length, and X is any amino acid. These putative MD defensins may further have a protein length of at least 90 amino acids or greater and an absence of any premature stop codons in its coding sequence. Furthermore, each defensin region of a multi-domain defensin may be defined as having at least 6 cysteine residues, or at least 8 cysteine residues, and a predicted Cys-stabilized αβ motif (CSαβ) structure when folded as described above. However, one or more of the defensin region(s) may each have fewer cysteines according to some embodiments, such as 4 or 5 cysteines in one or more of the defensin region(s). Thus, a multi-domain defensin may have at least 8 cysteine residues, or at least 10 cysteine residues, at least 12 cysteine residues, or at least 14 cysteine residues, and/or two or more predicted CSαβ structural motifs. Multi-domain defensins may also be defined functionally as having certain pesticidal or anti-fungal activity against one or more plant fungal pathogens.

[0037] As introduced above, the invention provides synthetic 2D or other MD defensins comprising at least a first defensin region linked to a second defensin region by a linker region. The defensin regions of a multi-domain defensin protein may be homomeric (i.e., the defensin regions are the same) or heteromeric (i.e., the defensin regions are different). A 2D or MD defensin of the invention may comprise a native combination of defensin regions (i.e., comprising the same combination of defensin regions present in a native multi-domain defensin) or a heterologous combination of defensin regions (i.e., comprising defensin regions that do not exist together in a native multi-domain defensin and/or derived from different defensins). One or more of the defensin region(s) may be heterologous with respect to a linker region(s) of the MD defensin. Indeed, a multi-domain defensin of the disclosure may comprise a native combination of defensin regions that may be homomeric or heteromeric relative to each other but heterologous with respect to a linker region. Without being bound by any theory, synthetic multi-domain defensins having a linker region that is heterologous with respect to at least one defensin region may tend to accumulate to higher levels when expressed in a plant or plant cell and/or confer new or altered anti-fungal or anti-microbial activities.

[0038] As further described above, embodiments of the disclosure provide nucleic acids and polynucleotides comprising one or more of SEQ ID NOs: 455-558 and/or a defensin sequence portion of one or more of 955-1053, such as SEQ ID NOs: 1-51, 203-328, or 1155 and defensin polypeptides or proteins encoded by these polynucleotide sequences. Defensin polypeptides or proteins may comprise one or more of SEQ ID NOs: 559-662 and/or a defensin sequence portion of one or more of 1054-1152, such as SEQ ID NOs: 52-102, 329-454, or 1156. Complements to any of the nucleic acid or polynucleotide sequences described herein are also provided. Polynucleotide molecules of the invention may encode a multi-domain defensin polypeptide comprising two or more defensin domains or regions, such as a 2D, 3D, 4D, or other MD defensin protein. Each defensin region of a multi-domain defensin is separated from all other defensin regions by one or more linker region(s) with at least one linker region being present between adjacent or neighboring defensin regions. In specific embodiments, a multi-domain defensin protein may comprise two or more defensin domains each comprising 4, 5, 6, 7, 8, 9, 10, or more cysteine residues. In certain embodiments as explained above, a polynucleotide molecule provided herein may be defined as comprising one or more nucleotide sequences, each having at least 70%, at least 75%, at least 80%, at least 85%, at least 90%, at least 91%, at least 92%, at least 93%, at least 94%, at least 95%, at least 96%, at least 97%, at least 98%, at least 99%, or 100% sequence identity to the full length sequence of SEQ ID NOs: 1-51, 103-152, 203-328, 455-558, 663-808, 1155 and/or a defensin sequence portion of 955-1053 and/or 1153. Similarly, a polypeptide molecule provided herein may be defined as comprising one or more protein sequences, each having at least 80%, at least 85%, at least 90%, at least 91%, at least 92%, at least 93%, at least 94%, at least 95%, at least 96%, at least 97%, at least 98%, at least 99%, or 100% sequence identity to the full length sequence of SEQ ID NOs: 52-102, 153-202, 329-454, 559-662, 809-954, 1156, and/or a defensin sequence portion of 1054-1152 and/or 1154.

[0039] Polynucleotide sequences of the disclosure may, when expressed in a plant, confer increased pesticidal or fungicidal activity and/or increased pest or fungal control to the plant. Indeed, polynucleotide constructs encoding multi-domain defensins of the disclosure may be used to generate transgenic plants with greater resistance or tolerance to one or more fungal pathogens. Such pesticidal or fungicidal activity may be effective against one or more of a Fusarium, Colletotrichum, Stenocarpella, and/or Phakopsora species, such as one or more of Fusarium graminearum, Fusarium verticilloides, Colletotrichum graminicola, Stenocarpella maydis, and/or Phakopsora pachyrhizi. Such pesticidal activity may be further effective against other microbial plant pathogen(s) and/or plant pest(s), such as oomycetes, bacteria, insects, nematodes, etc.

[0040] The invention also provides recombinant DNA constructs comprising the polynucleotide sequences described herein, as well as plants, plant cells and seeds transformed therewith. In one embodiment, such DNA constructs may be used in expressing nucleotide sequences encoding 1D, 2D, or other MD defensins in plants for the purposes of protecting the plant from plant pests, such as one or more fungi. In another embodiment, such constructs may be of use in generating transgenic or recombinant plants with increased or enhanced resistance or tolerance to plant fungal pathogens. Thus, embodiments of the invention further comprise transformation vectors comprising a defensin-encoding DNA construct of the invention or a portion of such defensin-encoding DNA construct. According to some embodiments, defensin-encoding DNA constructs and vectors may be used for generating 1D, 2D, or MD defensin transcripts and/or proteins in microorganisms such as bacteria or yeast.

[0041] A recombinant DNA construct, molecule or vector of the invention may comprise a polynucleotide expression cassette comprising a coding sequence that encodes a 1D defensin or multi-domain defensin protein, wherein the coding sequence is operably linked to a promoter that is functional in a plant cell. Alternatively, the defensin-encoding polynucleotide sequence may be operably linked to a promoter suitable for expression of a defensin protein in a microorganism. Any suitable promoter known in the art may be used to express a defensin coding sequence of the invention in a plant, such as a constitutive, tissue-specific, tissue-enhanced or tissue-preferred, developmental, inducible, disease inducible, etc., promoter. Further, the plant promoter operably linked to the defensin coding sequence may be native, homologous or heterologous relative to the plant species to be transformed with the defensin-encoding DNA construct, or alternatively, the promoter may be chimeric or synthetic. A synthetic nucleotide sequence may be a nucleotide sequence that is not known to occur in nature or that is not naturally occurring. Generally, such a synthetic nucleotide sequence will comprise at least one nucleotide difference when compared to any other naturally occurring nucleotide sequence. It is recognized that a gene-regulatory element of the invention comprises a synthetic nucleotide sequence. Preferably, the synthetic nucleotide sequence shares little or no extended homology to natural sequences. Extended homology in this context generally refers to 100% sequence identity extending beyond about 25 nucleotides of contiguous sequence. A synthetic gene-regulatory element of the invention comprises a synthetic nucleotide sequence.

[0042] The polynucleotide coding sequence for expressing the defensin protein may also be operatively linked to one or more additional regulatory element(s), such as an enhancer(s), leader, transcription start site (TSS), linker, 5′ and 3′ untranslated region(s), intron(s), polyadenylation signal, termination region or sequence, etc., that are suitable or necessary for regulating or allowing expression of the multi-domain defensin in a plant cell. Such additional regulatory element(s) may be optional and/or used to enhance or optimize expression of the defensin transgene or coding sequence. The term “operably linked” refers to a functional connection between the two sequences. A promoter or enhancer is “operably linked” to a transgene or coding sequence by affecting, causing, driving, promoting, etc., transcription and expression of the transgene or coding sequence.

[0043] According to embodiments of the invention, the term “recombinant” in reference to a DNA molecule, construct, vector, etc., refers to a DNA molecule or sequence that is not found in nature and/or is present in a context in which it is not found in nature, including a DNA molecule, construct, etc., comprising a combination of DNA sequences that would not naturally occur contiguously or in close proximity together without human intervention, and/or a DNA molecule, construct, etc., comprising at least two DNA sequences that are heterologous with respect to each other. A recombinant DNA molecule, construct, etc., may comprise DNA sequence(s) that is/are separated from other polynucleotide sequence(s) that exist in proximity to such DNA sequence(s) in nature, and/or a DNA sequence that is adjacent to (or contiguous with) other polynucleotide sequence(s) that are not naturally in proximity with each other. A recombinant DNA molecule, construct, etc., may also refer to a DNA molecule or sequence that has been genetically engineered and constructed outside of a cell. For example, a recombinant DNA molecule may comprise any suitable plasmid, vector, etc., and may include a linear or circular DNA molecule. Such plasmids, vectors, etc., may contain various maintenance elements including a prokaryotic origin of replication and selectable marker, as well as a defensin expressing transgene or cassette perhaps in addition to a plant selectable marker gene, etc. The term “recombinant” may also further refer to proteins expressed or encoded by these recombinant DNA molecules, constructs, etc., if they comprise non-native sequences.

[0044] As used herein, the term “isolated” in reference to a DNA molecule, construct, vector, etc., may refer to a DNA molecule or sequence that is not found in nature and/or is present in a context in which it is not found in nature. The term “isolated” may also refer to a nucleic acid molecule that has undergone at least one step towards being isolated or concentrated or enriched from a more complex solution or source. The term “isolated,” however, is in no way intended to limit the nucleic acid molecule to a particular location or state, and the invention extends to the nucleic acid molecule when introduced into the genome of a cell or when it is resident in progeny of cells into which the nucleic acid molecule has been introduced into its genome.

[0045] According to another broad aspect of the invention, methods are provided for transforming a plant cell, tissue or explant with a recombinant DNA molecule or construct comprising a defensin transgene or coding sequence to produce a defensin containing transgenic plant. Numerous methods for transforming chromosomes in a plant cell with a recombinant DNA molecule are known in the art, which may be used according to methods of the invention to produce a transgenic plant cell and plant. Any suitable method or technique for transformation of a plant cell known in the art may be used according to present methods. Effective methods for transformation of plants include bacterially mediated transformation, such as Agrobacterium-mediated or Rhizhobium-mediated transformation, and microprojectile bombardment-mediated transformation. Other methods for plant transformation are also known in the art including, but not limited to, gene editing, site-directed integration, PEG-mediated transformation, protoplast transformation, electroporation, microinjection, agitation with silica/carbon fibers, virus-mediated or liposome-mediated transformation, etc. A variety of methods are known in the art for transforming explants with a transformation vector via bacterially mediated transformation or microprojectile bombardment and then subsequently culturing, etc, those explants to regenerate or develop transgenic plants. Methods are further provided for expressing a multi-domain defensin transgene of the invention in one or more plant cells or tissues under the control of a promoter operable in a plant cell. Such methods may be used to confer anti-fungal and pesticidal properties to a plant and combat a fungal infection.

[0046] Transformation of a target plant material or explant may be practiced in tissue culture on nutrient media, for example a mixture of nutrients that allow cells to grow in vitro. Recipient cell targets or explants may include, but are not limited to, meristems, shoot tips, protoplasts, hypocotyls, calli, immature or mature embryos, shoots, buds, nodal sections, leaves, gametic cells such as microspores, pollen, sperm and egg cells, etc., or any suitable portions thereof. It is contemplated that any transformable cell or tissue from which a fertile plant can be regenerated or grown/developed may be used as a target for transformation. Transformed explants, cells or tissues may be subjected to additional culturing steps, such as callus induction, selection, regeneration, etc., as known in the art. Transformed cells, tissues or explants containing a recombinant DNA insertion may be grown, developed or regenerated into transgenic plants in culture, plugs or soil according to methods known in the art. Transgenic plants may be further crossed to themselves or other plants to produce transgenic seeds and progeny. A transgenic plant may also be prepared by crossing a first plant comprising the recombinant DNA sequence or transformation event with a second plant lacking the insertion. For example, a recombinant DNA sequence may be introduced into a first plant line that is amenable to transformation, which may then be crossed with a second plant line to introgress the recombinant DNA sequence into the second plant line. Progeny of these crosses can be further back crossed into the more desirable line multiple times, such as through 6 to 8 generations or back crosses, to produce a progeny plant with substantially the same genotype as the original parental line but for the introduction of the recombinant DNA sequence.

[0047] A recombinant DNA molecule or construct of the invention may be included within a DNA transformation vector for use in transformation of a target plant cell, tissue or explant. Such a transformation vector of the invention may generally comprise sequences or elements necessary or beneficial for effective transformation in addition to the defensin expressing transgene or expression cassette. For Agrobacterium-mediated transformation, the transformation vector may comprise an engineered transfer DNA (or T-DNA) segment or region having two border sequences, a left border (LB) and a right border (RB), flanking at least the defensin expressing transgene or cassette, such that insertion of the T-DNA into the plant genome will create a transformation event for the defensin transgene or cassette. In other words, the defensin transgene would be located between the left and right borders of the T-DNA, perhaps along with an additional transgene(s) or expression cassette(s), such as a plant selectable marker transgene and/or other gene(s) of agronomic interest that may confer a trait or phenotype of agronomic interest to a plant. In addition to protein encoding sequences, a gene of agronomic interest may further comprise a polynucleotide sequence encoding a RNA suppression element. According to alternative embodiments, the defensin-encoding transgene or cassette and the plant selectable marker transgene (or other gene of agronomic interest) may be present in separate T-DNA segments on the same or different recombinant DNA molecule(s), such as for co-transformation. A transformation vector or construct may further comprise prokaryotic maintenance elements, which for Agrobacterium-mediated transformation may be located in the vector backbone outside of the T-DNA region(s).

[0048] A plant selectable marker transgene in a transformation vector or construct of the invention may be used to assist in the selection of transformed cells or tissue due to the presence of a selection agent, such as an antibiotic or herbicide, wherein the plant selectable marker transgene provides tolerance or resistance to the selection agent. Thus, the selection agent may bias or favor the survival, development, growth, proliferation, etc., of transformed cells expressing the plant selectable marker gene, such as to increase the proportion of transformed cells or tissues in the R₀ plant. Commonly used plant selectable marker genes include, for example, those conferring tolerance or resistance to antibiotics, such as kanamycin and paromomycin (nptII), hygromycin B (aph IV), streptomycin or spectinomycin (aadA) and gentamycin (aac3 and aacC4), or those conferring tolerance or resistance to herbicides such as glufosinate (bar or pat), dicamba (DMO) and glyphosate (aroA or EPSPS). Plant screenable marker genes may also be used, which provide an ability to visually screen for transformants, such as luciferase or green fluorescent protein (GFP), or a gene expressing a beta glucuronidase or uidA gene (GUS) for which various chromogenic substrates are known.

[0049] Additionally provided herein are transgenic plants, plant parts, propagules and plant cells transformed with a recombinant DNA construct or vector of the invention having a polynucleotide sequence encoding a multi-domain defensin. Such a transgenic plant, plant part, or plant cell may comprise a transformation event or insertion of a defensin-encoding recombinant DNA construct or sequence of the invention into the genome of at least one plant cell thereof. A transgenic plant comprising the defensin-encoding DNA construct or sequence may be produced by any suitable transformation method, which may be followed by selection, culturing, regeneration, development, etc., as desired or needed to produce a transgenic R₀ plant, which may then be selfed or crossed to other plants to generate R1 seed and subsequent progeny generations and seed through additional crosses, etc. Similarly, embodiments of the invention further include a plant cell, tissue, explant, etc., comprising one or more transgenic cells having a transformation event or genomic insertion of a recombinant DNA or polynucleotide sequence comprising the defensin-encoding transgene, construct or sequence. Transgenic plants comprising a defensin-encoding transgene may have increased resistance or tolerance to one or more plant pests or fungi and/or increased anti-fungal properties or activities, relative to a wild type or control plant not having the defensin-encoding transgene.

[0050] For purposes of the invention, a “plant” may include an explant, embryo, seedling, plantlet or whole plant at any stage of regeneration or development. As used herein, a “transgenic plant” refers to a plant whose genome has been altered by the integration or insertion of a recombinant DNA molecule, construct or sequence. A transgenic plant includes an R₀ plant developed or regenerated from an originally transformed plant cell(s) as well as progeny transgenic plants in later generations or crosses from the R₀ transgenic plant. As used herein, a “plant part” may refer to any organ or intact tissue of a plant, such as a meristem, shoot organ/structure (e.g., leaf, stem and tuber), root, flower or floral organ/structure (e.g., bract, sepal, petal, stamen, carpel, anther, pollen and ovule), seed (e.g., embryo, endosperm, and seed coat), fruit (e.g., the mature ovary), propagule, or other plant tissues (e.g., cuttings, vascular tissue, ground tissue, and the like), callus, protoplasts, or any portion thereof. Plant parts of the invention may be viable, nonviable, regenerable, and/or non-regenerable. A “propagule” may include any plant part that is capable of growing into an entire plant. As used herein, a “transgenic plant cell” simply refers to any plant cell that is transformed with a stably-integrated recombinant DNA molecule or sequence. A transgenic plant cell may include an originally-transformed plant cell, a transgenic plant cell of a regenerated or developed R₀ plant, or a transgenic plant cell from any progeny plant or offspring of the transformed R₀ plant, including cell(s) of a plant seed or embryo, or a cultured plant or callus cell, etc.

[0051] The transformed plants may be analyzed for the presence of the defensin-encoding sequence or transgene and/or its expression level and/or profile in a plant or plant cell or tissue. Those of skill in the art are aware of numerous methods available for the analysis of transformed plants. For example, methods for plant analysis include, but are not limited to, Southern blots or northern blots, PCR-based approaches, biochemical analyses, phenotypic screening methods, and immunoblotting assays. The expression of a transcribable DNA molecule or transgene can be measured, for example, using TaqMan® (Applied Biosystems, Foster City, Calif.) reagents and methods as described by the manufacturer and PCR cycle times determined using the TaqMan® Testing Matrix. As an alternative example, the Invader® (Third Wave Technologies, Madison, Wis.) reagents and methods as described by the manufacturer can be used to evaluate transgene expression.

[0052] The transgenic plants of the invention comprising a defensin-encoding polynucleotide sequence or construct can be any agricultural crop species. The species may be a monocotyledonous or dicotyledonous plant. Particularly useful plants may include but are not limited to wheat, carrot, sorghum rice, barley, soybean, potato, corn, Brassica, canola, tomato, alfalfa, peanut, sugarcane and cotton. The plant can be an R₀ transgenic plant (i.e., a plant derived from the original transformed tissue). The transgenic plant can also be any generation of progeny plants derived from the original R₀ transgenic plant, such as by any known method of crossing, introgressing, converting or propagating plants.

[0053] The invention also provides methods for producing a transgenic plant with increased pest resistance or tolerance and/or pesticidal activity comprising introducing or transforming into the plant a recombinant DNA construct encoding a defensin protein as described herein. Such a method may further comprise: growing said plant to produce a further generation; and selecting at least one plant from said further generation comprising the recombinant DNA construct, wherein said plant has increased pest resistance or tolerance and/or anti-fungal activity relative to a control plant that does not comprise the recombinant DNA construct. Further provided is a method for producing plants with increased pest resistance or tolerance and/or pesticidal activity comprising crossing a transgenic plant of the invention with itself or a second plant to produce at least a first progeny plant, wherein said progeny plant comprises increased pest resistance or tolerance. Seed from plants comprising the recombinant DNA construct and having increased pesticidal activity and/or pest resistance or tolerance may be obtained from any number of sources.

[0054] According to another aspect of the invention, pesticidal compositions are provided comprising a defensin polypeptide or protein of the invention having pesticidal or anti-fungal activity. Such pesticidal compositions may further comprise other compounds or active pesticidal molecules that may be effective against one or more insects, nematodes, microbes, fungi, nematodes, or viruses. These pesticidal compositions comprising one or more recombinant defensin(s) of the invention may be formulated as a solid or liquid and/or applied as a topical, foliar, soil, or granular application or treatment to prevent or inhibit fungal infections and/or other plant pest infestations. Examples of other types of plant pests include insects, nematodes, weeds, microbes, such as bacteria, fungi, and viruses, etc. Methods for formulating a pesticidal composition of the invention may be similar to methods known in the art for other pesticidal formulations. Ingredients or components for pesticidal composition of the invention may include one or more carriers, diluents, surfactants, or other formulation ingredients known in the art.

### EXAMPLES

### Example 1. Identification of Defensins with Two or More Defensin Regions

[0055] Plant defensins are small polypeptides comprising an N-terminal signal peptide and a defensin region comprising approximately 50 amino acids and usually having 6 to 8 cysteines. The invention provides new multi-domain defensins comprising two defensin regions (2D defensins) or multiple defensin regions (MD defensins) connected by a short linker region. Many of these 2D or MD defensins were further found to comprise an N-terminal transit signal (TS) sequence or region that may generally become cleaved from the remainder of the protein to produce a mature defensin protein. Some of the 2D or MD defensins were also found to comprise a C-terminal extension sequence.

[0056] To identify novel multi-domain defensins, genomic and transciptome sequences from 19 different plant species were mined and analyzed to identify longer polypeptide sequences having one or more structural or functional features characteristic of defensins. Polypeptides meeting the following criteria were identified as multi-domain defensins and subjected to further analysis: (a) Polypeptides comprising a Pfam gamma-thionin domain (PF00304), as determined by a search of the Pfam protein families database using an E-value cutoff of 1e⁻³ (Finn, et al. Nucleic Acids Research, 2014, Database Issue 42:D222-D230); (b) Polypeptides comprising at least 100 amino acids; (c) Polypeptides comprising at least 8 cysteine residues; and (d) Polypeptides comprising two or more extended gamma-thionin domains (GXCXₙC) separated by a short polypeptide linker sequence, wherein the n is 3-22 amino acids in length, and X is any amino acid. These putative multi-domain defensins were further identified by the absence of a premature stop codon in their coding sequence.

[0057] A total of 51 multi-domain defensin proteins including mostly 2D defensins were identified (see below) by mining the genomes of the following 19 plant genomes: Arabidopsis lyrata, Arabidopsis thaliana, Brassica rapa, Brassica napus, Carica papaya, Citrus clementina, Citrus sinensis, Cucumis melo, Cucumis sativus, Glycine max, Kochia scoparia, Malus domestica, Medicago truncatula, Portulaca oleracea, Prunus persica, Raphanus raphanistrum, Rosa blanda, Trifolium repens, and Zea mays. The detection of mRNA transcripts for these multi-domain defensins and their discovery in many plant species supports the conclusion that these multi-domain defensins are expressed in plants.

### Example 2. Annotation of Multi-Domain Defensins

[0058] Full-length multi-domain protein sequences identified by the above criteria were further analyzed using a combination of manual calls, multiple sequence alignments, and N-terminal cleavage site (SignalP) predictions to identify and locate the N-terminal TS or signal peptide sequences, defensin regions, intervening linker regions, and C-terminal extensions. Linker regions were identified as being between the last cysteine residue of the defensin region on the N-terminal side and one or two amino acids upstream of the first cysteine residue in the defensin region on the C-terminal side. Determining the position of the C-terminal end of the linker region of an identified 2D or MD defensin is based on the expected position of the predicted cleavage site of the downstream defensin region on the C-terminal side of the linker region, although this site may generally not become cleaved, unlike the cleavage site between the N-terminal TS sequence and the adjacent defensin region.

[0059] The 51 multi-domain defensin sequences identified from the 19 plant genomes are shown in Tables 1 and 2. SEQ ID NOs: 1-51 represent nucleotide coding sequences of the newly identified 2D or MD defensins, and SEQ ID NOs: 52-102 represent the corresponding polypeptide sequences of these identified 2D or MD defensins. For each of the identified 2D and MD defensins, the sequence boundaries (start and stop positions) for each of the defensin regions (D1, D2, etc.), linker region(s) (L1, L2, etc.), N-terminal transit signal (TS) sequence, and C-terminal (CT) extension sequence (if present; “NA” if not present) are shown for the DNA and protein sequences in Tables 1 and 2, respectively. The full coding sequence (CDS) is also provided in Table 1. The defensin components of these 2D or MD defensins correspond to each of the defensin regions annotated in Tables 1 and 2. For illustration, the defensin components of “ARAly_AFP26” on a nucleotide level correspond to nucleotides positions 82-207 (D1) and 229-372 (D2) of SEQ ID NO: 1, whereas the defensin components of “ARAly_AFP26” on a protein level correspond to amino acid positions 28-69 (D1) and 77-124 (D2) of SEQ ID NO: 52.

TABLE 1
Nucleotide start and end positions for each region within the identified MD or 2D defensin sequences.

| | | | TS | | CDS | | CT | | D1 | | D2 | |
|---|---|---|---|---|---|---|---|---|---|---|---|---|
| | DNA | Protein | TS | TS | CDS | CDS | CT | CT | D1 | D1 | D2 | D2 |
| Locus ID | SEQ ID NO. | SEQ ID NO. | Start | End | Start | End | Start | End | Start | End | Start | End |
| ARAly_AFP26 | 1 | 52 | 1 | 81 | 82 | 372 | NA | NA | 82 | 207 | 229 | 372 |
| At_AFP10 | 2 | 53 | 1 | 63 | 64 | 387 | NA | NA | 64 | 234 | 259 | 387 |
| At_AFP11 | 3 | 54 | 1 | 78 | 79 | 381 | NA | NA | 79 | 210 | 241 | 381 |
| At_AFP12 | 4 | 55 | 1 | 81 | 82 | 360 | NA | NA | 82 | 195 | 220 | 360 |
| At_AFP8 | 5 | 56 | 1 | 78 | 79 | 378 | NA | NA | 79 | 204 | 259 | 378 |
| At_AFP9 | 6 | 57 | 1 | 78 | 79 | 366 | NA | NA | 79 | 210 | 226 | 366 |
| BASsc_AFP21 | 7 | 58 | 1 | 21 | 22 | 354 | NA | NA | 22 | 162 | 193 | 354 |
| Bn_AFP35 | 8 | 59 | 1 | 99 | 100 | 402 | NA | NA | 100 | 228 | 259 | 402 |
| Bn_AFP36 | 9 | 60 | 1 | 18 | 19 | 330 | NA | NA | 19 | 150 | 187 | 330 |
| Bn_AFP47 | 10 | 61 | 1 | 78 | 79 | 366 | NA | NA | 79 | 204 | 238 | 366 |
| Bn_AFP74 | 11 | 62 | 1 | 78 | 79 | 381 | NA | NA | 79 | 210 | 238 | 381 |
| Bn_AFP75 | 12 | 63 | 1 | 45 | 46 | 357 | NA | NA | 46 | 180 | 214 | 357 |
| Bn_AFP76 | 13 | 64 | 1 | 78 | 79 | 381 | NA | NA | 79 | 210 | 238 | 381 |
| Bn_AFP79 | 14 | 65 | 1 | 78 | 79 | 366 | NA | NA | 79 | 192 | 223 | 366 |
| Bn_AFP80 | 15 | 66 | 1 | 78 | 79 | 366 | NA | NA | 79 | 192 | 223 | 366 |
| Br_AFP1 | 16 | 67 | 1 | 42 | 43 | 333 | NA | NA | 43 | 177 | 241 | 333 |
| Br_AFP2 | 17 | 68 | 1 | 78 | 79 | 360 | NA | NA | 79 | 198 | 220 | 360 |
| CARpa_AFP1 | 18 | 69 | 1 | 45 | 46 | 402 | NA | NA | 46 | 192 | 217 | 402 |
| CARpa_AFP2 | 19 | 70 | 1 | 63 | 64 | 420 | NA | NA | 64 | 207 | 232 | 420 |
| CARpa_AFP3 | 20 | 71 | 1 | 69 | 70 | 384 | NA | NA | 70 | 192 | 202 | 384 |
| CITcl_AFP10 | 21 | 72 | 1 | 81 | 82 | 393 | NA | NA | 82 | 198 | 208 | 393 |
| CITcl_AFP11 | 22 | 73 | 1 | 66 | 67 | 402 | NA | NA | 67 | 195 | 220 | 402 |
| CITcl_AFP2 | 23 | 74 | 1 | 90 | 91 | 408 | NA | NA | 91 | 225 | 247 | 408 |
| CITcl_AFP3 | 24 | 75 | 1 | 75 | 76 | 390 | NA | NA | 76 | 216 | 250 | 390 |
| CITsi_AFP1 | 25 | 76 | 1 | 93 | 94 | 411 | NA | NA | 94 | 216 | 226 | 411 |
| CITsi_AFP2 | 26 | 77 | 1 | 54 | 55 | 369 | NA | NA | 55 | 195 | 226 | 369 |
| CUCme_AFP1 | 27 | 78 | 1 | 24 | 25 | 345 | NA | NA | 25 | 168 | 205 | 345 |
| CUCsa_AFP3 | 28 | 79 | 1 | 24 | 25 | 345 | NA | NA | 25 | 168 | 205 | 345 |
| Gm_AFP1 | 29 | 80 | 1 | 81 | 82 | 411 | NA | NA | 82 | 207 | 217 | 411 |
| Gm_AFP2 | 30 | 81 | 1 | 81 | 82 | 387 | NA | NA | 82 | 207 | 244 | 387 |
| MALdo_AFP11 | 31 | 82 | 1 | 87 | 88 | 408 | NA | NA | 88 | 219 | 250 | 408 |
| Mt_AFP14 | 32 | 83 | 1 | 87 | 88 | 408 | NA | NA | 88 | 237 | 259 | 408 |
| Mt_AFP60 | 33 | 84 | 1 | 84 | 85 | 390 | NA | NA | 85 | 204 | 244 | 390 |
| Mt_AFP65 | 34 | 85 | 1 | 78 | 79 | 384 | NA | NA | 79 | 204 | 235 | 384 |
| Mt_AFP66 | 35 | 86 | 1 | 69 | 70 | 285 | NA | NA | 70 | 105 | 142 | 285 |
| Mt_AFP67 | 36 | 87 | 1 | 81 | 82 | 387 | NA | NA | 79 | 207 | 235 | 387 |
| Mt_AFP77 | 37 | 88 | 1 | 81 | 82 | 390 | NA | NA | 82 | 189 | 232 | 390 |
| Mt_AFP78 | 38 | 89 | 1 | 78 | 79 | 384 | NA | NA | 79 | 207 | 238 | 384 |
| PORol_AFP1 | 39 | 90 | 1 | 63 | 64 | 360 | NA | NA | 64 | 228 | 256 | 360 |
| PORol_AFP2 | 40 | 91 | NA | NA | 1 | 297 | NA | NA | 1 | 165 | 193 | 297 |
| PORol_AFP27 | 41 | 92 | 1 | 87 | 88 | 390 | NA | NA | 88 | 219 | 241 | 390 |
| PRUpe_AFP1 | 42 | 93 | 1 | 18 | 19 | 402 | NA | NA | 19 | 201 | 211 | 402 |
| RAPra_AFP23 | 43 | 94 | 1 | 96 | 97 | 411 | NA | NA | 97 | 228 | 265 | 411 |
| RAPra_AFP24 | 44 | 95 | 1 | 78 | 79 | 384 | NA | NA | 79 | 213 | 238 | 384 |
| RAPra_AFP25 | 45 | 96 | 1 | 27 | 28 | 345 | NA | NA | 28 | 165 | 199 | 345 |
| RAPra_AFP26 | 46 | 97 | 1 | 9 | 10 | 294 | NA | NA | 10 | 132 | 163 | 294 |
| RAPra_AFP27 | 47 | 98 | 1 | 78 | 79 | 363 | NA | NA | 79 | 201 | 232 | 363 |
| ROSbl_AFP11 | 48 | 99 | 1 | 78 | 79 | 360 | NA | NA | 79 | 204 | 214 | 360 |
| TRIre_AFP5 | 49 | 100 | 1 | 84 | 85 | 387 | NA | NA | 85 | 204 | 241 | 387 |
| Zm_AFP101 | 50 | 101 | 1 | 24 | 25 | 420 | 421 | 474 | 25 | 120 | 283 | 420 |
| Zm_AFP100 | 51 | 102 | 1 | 162 | 163 | 966 | 967 | 1002 | 163 | 312 | 397 | 534 |

| | D3 | | D4 | | L1 | | L2 | | L3 | |
|---|---|---|---|---|---|---|---|---|---|---|
| | D3 | D3 | D4 | D4 | Linker1 | Linker1 | Linker2 | Linker2 | Linker3 | Linker3 |
| Locus ID | Start | End | Start | End | Start | End | Start | End | Start | End |
| ARAly_AFP26 | | | | | 208 | 228 | | | | |
| At_AFP10 | | | | | 235 | 258 | | | | |
| At_AFP11 | | | | | 211 | 240 | | | | |
| At_AFP12 | | | | | 196 | 219 | | | | |
| At_AFP8 | | | | | 205 | 258 | | | | |
| At_AFP9 | | | | | 211 | 225 | | | | |
| BASsc_AFP21 | | | | | 163 | 192 | | | | |
| Bn_AFP35 | | | | | 229 | 258 | | | | |
| Bn_AFP36 | | | | | 151 | 186 | | | | |
| Bn_AFP47 | | | | | 205 | 237 | | | | |
| Bn_AFP74 | | | | | 211 | 237 | | | | |
| Bn_AFP75 | | | | | 181 | 213 | | | | |
| Bn_AFP76 | | | | | 211 | 237 | | | | |
| Bn_AFP79 | | | | | 193 | 222 | | | | |
| Bn_AFP80 | | | | | 193 | 222 | | | | |
| Br_AFP1 | | | | | 178 | 240 | | | | |
| Br_AFP2 | | | | | 199 | 219 | | | | |
| CARpa_AFP1 | | | | | 193 | 216 | | | | |
| CARpa_AFP2 | | | | | 208 | 231 | | | | |
| CARpa_AFP3 | | | | | 193 | 201 | | | | |
| CITcl_AFP10 | | | | | 199 | 207 | | | | |
| CITcl_AFP11 | | | | | 196 | 219 | | | | |
| CITcl_AFP2 | | | | | 226 | 246 | | | | |
| CITcl_AFP3 | | | | | 217 | 249 | | | | |
| CITsi_AFP1 | | | | | 217 | 225 | | | | |
| CITsi_AFP2 | | | | | 196 | 225 | | | | |
| CUCme_AFP1 | | | | | 169 | 204 | | | | |
| CUCsa_AFP3 | | | | | 169 | 204 | | | | |
| Gm_AFP1 | | | | | 208 | 216 | | | | |
| Gm_AFP2 | | | | | 208 | 243 | | | | |
| MALdo_AFP11 | | | | | 220 | 249 | | | | |
| Mt_AFP14 | | | | | 238 | 258 | | | | |
| Mt_AFP60 | | | | | 205 | 243 | | | | |
| Mt_AFP65 | | | | | 205 | 234 | | | | |
| Mt_AFP66 | | | | | 106 | 141 | | | | |
| Mt_AFP67 | | | | | 208 | 234 | | | | |
| Mt_AFP77 | | | | | 190 | 231 | | | | |
| Mt_AFP78 | | | | | 208 | 237 | | | | |
| PORol_AFP1 | | | | | 229 | 255 | | | | |
| PORol_AFP2 | | | | | 166 | 192 | | | | |
| PORol_AFP27 | | | | | 220 | 240 | | | | |
| PRUpe_AFP1 | | | | | 202 | 210 | | | | |
| RAPra_AFP23 | | | | | 229 | 264 | | | | |
| RAPra_AFP24 | | | | | 214 | 237 | | | | |
| RAPra_AFP25 | | | | | 166 | 198 | | | | |
| RAPra_AFP26 | | | | | 133 | 162 | | | | |
| RAPra_AFP27 | | | | | 202 | 231 | | | | |
| ROSbl_AFP11 | | | | | 205 | 213 | | | | |
| TRIre_AFP5 | | | | | 205 | 240 | | | | |
| Zm_AFP101 | | | | | 121 | 282 | | | | |
| Zm_AFP100 | 613 | 750 | 829 | 966 | 313 | 396 | 535 | 612 | 751 | 828 |

TABLE 2
Protein start and end positions for each region within the identified MD or 2D defensin sequences.

| | | | TS | | CT | | D1 | | D2 | |
|---|---|---|---|---|---|---|---|---|---|---|
| | DNA | Protein | TS | TS | CT | CT | D1 | D1 | D2 | D2 |
| Locus ID | SEQ ID NO. | SEQ ID NO. | Start | End | Start | End | Start | End | Start | End |
| ARAly_AFP26 | 1 | 52 | 1 | 27 | NA | NA | 28 | 69 | 77 | 124 |
| At_AFP10 | 2 | 53 | 1 | 21 | NA | NA | 22 | 78 | 87 | 129 |
| At_AFP11 | 3 | 54 | 1 | 26 | NA | NA | 27 | 70 | 81 | 127 |
| At_AFP12 | 4 | 55 | 1 | 27 | NA | NA | 28 | 65 | 74 | 120 |
| At_AFP8 | 5 | 56 | 1 | 26 | NA | NA | 27 | 68 | 87 | 126 |
| At_AFP9 | 6 | 57 | 1 | 26 | NA | NA | 27 | 70 | 76 | 122 |
| BASsc_AFP21 | 7 | 58 | 1 | 7 | NA | NA | 8 | 54 | 65 | 118 |
| Bn_AFP35 | 8 | 59 | 1 | 33 | NA | NA | 34 | 76 | 87 | 134 |
| Bn_AFP36 | 9 | 60 | 1 | 6 | NA | NA | 7 | 50 | 63 | 110 |
| Bn_AFP47 | 10 | 61 | 1 | 26 | NA | NA | 27 | 68 | 80 | 122 |
| Bn_AFP74 | 11 | 62 | 1 | 26 | NA | NA | 27 | 70 | 80 | 127 |
| Bn_AFP75 | 12 | 63 | 1 | 15 | NA | NA | 16 | 60 | 72 | 119 |
| Bn_AFP76 | 13 | 64 | 1 | 26 | NA | NA | 27 | 70 | 80 | 127 |
| Bn_AFP79 | 14 | 65 | 1 | 26 | NA | NA | 27 | 64 | 75 | 122 |
| Bn_AFP80 | 15 | 66 | 1 | 26 | NA | NA | 27 | 64 | 75 | 122 |
| Br_AFP1 | 16 | 67 | 1 | 14 | NA | NA | 15 | 59 | 81 | 111 |
| Br_AFP2 | 17 | 68 | 1 | 26 | NA | NA | 27 | 66 | 74 | 120 |
| CARpa_AFP1 | 18 | 69 | 1 | 15 | NA | NA | 16 | 64 | 73 | 134 |
| CARpa_AFP2 | 19 | 70 | 1 | 21 | NA | NA | 22 | 69 | 78 | 140 |
| CARpa_AFP3 | 20 | 71 | 1 | 23 | NA | NA | 24 | 64 | 68 | 128 |
| CITcl_AFP10 | 21 | 72 | 1 | 27 | NA | NA | 28 | 66 | 70 | 131 |
| CITcl_AFP11 | 22 | 73 | 1 | 22 | NA | NA | 23 | 65 | 74 | 134 |
| CITcl_AFP2 | 23 | 74 | 1 | 30 | NA | NA | 31 | 75 | 83 | 136 |
| CITcl_AFP3 | 24 | 75 | 1 | 25 | NA | NA | 26 | 72 | 84 | 130 |
| CITsi_AFP1 | 25 | 76 | 1 | 31 | NA | NA | 32 | 72 | 76 | 137 |
| CITsi_AFP2 | 26 | 77 | 1 | 18 | NA | NA | 19 | 65 | 76 | 123 |
| CUCme_AFP1 | 27 | 78 | 1 | 8 | NA | NA | 9 | 56 | 69 | 115 |
| CUCsa_AFP3 | 28 | 79 | 1 | 8 | NA | NA | 9 | 56 | 69 | 115 |
| Gm_AFP1 | 29 | 80 | 1 | 27 | NA | NA | 28 | 69 | 73 | 137 |
| Gm_AFP2 | 30 | 81 | 1 | 27 | NA | NA | 28 | 69 | 82 | 129 |
| MALdo_AFP11 | 31 | 82 | 1 | 29 | NA | NA | 30 | 73 | 84 | 136 |
| Mt_AFP14 | 32 | 83 | 1 | 29 | NA | NA | 30 | 79 | 87 | 136 |
| Mt_AFP60 | 33 | 84 | 1 | 28 | NA | NA | 29 | 68 | 82 | 130 |
| Mt_AFP65 | 34 | 85 | 1 | 26 | NA | NA | 27 | 68 | 79 | 128 |
| Mt_AFP66 | 35 | 86 | 1 | 23 | NA | NA | 24 | 35 | 48 | 95 |
| Mt_AFP67 | 36 | 87 | 1 | 26 | NA | NA | 27 | 69 | 79 | 129 |
| Mt_AFP77 | 37 | 88 | 1 | 27 | NA | NA | 28 | 63 | 78 | 130 |
| Mt_AFP78 | 38 | 89 | 1 | 26 | NA | NA | 27 | 69 | 80 | 128 |
| PORol_AFP1 | 39 | 90 | 1 | 21 | NA | NA | 22 | 76 | 86 | 120 |
| PORol_AFP2 | 40 | 91 | NA | NA | NA | NA | 1 | 55 | 65 | 99 |
| PORol_AFP27 | 41 | 92 | 1 | 29 | NA | NA | 30 | 73 | 81 | 130 |
| PRUpe_AFP1 | 42 | 93 | 1 | 6 | NA | NA | 7 | 67 | 71 | 134 |
| RAPra_AFP23 | 43 | 94 | 1 | 32 | NA | NA | 33 | 76 | 89 | 137 |
| RAPra_AFP24 | 44 | 95 | 1 | 26 | NA | NA | 27 | 71 | 80 | 128 |
| RAPra_AFP25 | 45 | 96 | 1 | 9 | NA | NA | 10 | 55 | 67 | 115 |
| RAPra_AFP26 | 46 | 97 | 1 | 3 | NA | NA | 4 | 44 | 55 | 98 |
| RAPra_AFP27 | 47 | 98 | 1 | 26 | NA | NA | 27 | 67 | 78 | 121 |
| ROSbl_AFP11 | 48 | 99 | 1 | 26 | NA | NA | 11 | 68 | 72 | 120 |
| TRIre_AFP5 | 49 | 100 | 1 | 28 | NA | NA | 29 | 68 | 81 | 129 |
| Zm_AFP101 | 50 | 101 | 1 | 8 | 967 | 1002 | 9 | 40 | 95 | 140 |
| Zm_AFP100 | 51 | 102 | 1 | 54 | 421 | 474 | 55 | 104 | 133 | 178 |

| | D3 | | D4 | | L1 | | L2 | | L3 | |
|---|---|---|---|---|---|---|---|---|---|---|
| | D3 | D3 | D4 | D4 | Linker1 | Linker1 | Linker2 | Linker2 | Linker3 | Linker3 |
| Locus ID | Start | End | Start | End | Start | End | Start | End | Start | End |
| ARAly_AFP26 | | | | | 70 | 76 | | | | |
| At_AFP10 | | | | | 79 | 86 | | | | |
| At_AFP11 | | | | | 71 | 80 | | | | |
| At_AFP12 | | | | | 66 | 73 | | | | |
| At_AFP8 | | | | | 69 | 86 | | | | |
| At_AFP9 | | | | | 71 | 75 | | | | |
| BASsc_AFP21 | | | | | 55 | 64 | | | | |
| Bn_AFP35 | | | | | 77 | 86 | | | | |
| Bn_AFP36 | | | | | 51 | 62 | | | | |
| Bn_AFP47 | | | | | 69 | 79 | | | | |
| Bn_AFP74 | | | | | 71 | 79 | | | | |
| Bn_AFP75 | | | | | 61 | 71 | | | | |
| Bn_AFP76 | | | | | 71 | 79 | | | | |
| Bn_AFP79 | | | | | 65 | 74 | | | | |
| Bn_AFP80 | | | | | 65 | 74 | | | | |
| Br_AFP1 | | | | | 60 | 80 | | | | |
| Br_AFP2 | | | | | 67 | 73 | | | | |
| CARpa_AFP1 | | | | | 65 | 72 | | | | |
| CARpa_AFP2 | | | | | 70 | 77 | | | | |
| CARpa_AFP3 | | | | | 65 | 67 | | | | |
| CITcl_AFP10 | | | | | 67 | 69 | | | | |
| CITcl_AFP11 | | | | | 66 | 73 | | | | |
| CITcl_AFP2 | | | | | 76 | 82 | | | | |
| CITcl_AFP3 | | | | | 73 | 83 | | | | |
| CITsi_AFP1 | | | | | 73 | 75 | | | | |
| CITsi_AFP2 | | | | | 66 | 75 | | | | |
| CUCme_AFP1 | | | | | 57 | 68 | | | | |
| CUCsa_AFP3 | | | | | 57 | 68 | | | | |
| Gm_AFP1 | | | | | 70 | 72 | | | | |
| Gm_AFP2 | | | | | 70 | 81 | | | | |
| MALdo_AFP11 | | | | | 74 | 83 | | | | |
| Mt_AFP14 | | | | | 80 | 86 | | | | |
| Mt_AFP60 | | | | | 69 | 81 | | | | |
| Mt_AFP65 | | | | | 69 | 78 | | | | |
| Mt_AFP66 | | | | | 36 | 47 | | | | |
| Mt_AFP67 | | | | | 70 | 78 | | | | |
| Mt_AFP77 | | | | | 64 | 77 | | | | |
| Mt_AFP78 | | | | | 70 | 79 | | | | |
| PORol_AFP1 | | | | | 77 | 85 | | | | |
| PORol_AFP2 | | | | | 56 | 64 | | | | |
| PORol_AFP27 | | | | | 74 | 80 | | | | |
| PRUpe_AFP1 | | | | | 68 | 70 | | | | |
| RAPra_AFP23 | | | | | 77 | 88 | | | | |
| RAPra_AFP24 | | | | | 72 | 79 | | | | |
| RAPra_AFP25 | | | | | 56 | 66 | | | | |
| RAPra_AFP26 | | | | | 45 | 54 | | | | |
| RAPra_AFP27 | | | | | 68 | 77 | | | | |
| ROSbl_AFP11 | | | | | 69 | 71 | | | | |
| TRIre_AFP5 | | | | | 69 | 80 | | | | |
| Zm_AFP101 | | | | | 41 | 94 | | | | |
| Zm_AFP100 | 205 | 250 | 277 | 322 | 105 | 132 | 179 | 204 | 251 | 276 |

### Example 3. Identification of Linker Regions from Multi-Domain Defensins

[0060] Upon examination of the discovered multi-domain plant defensins, linker regions were identified between the defensin regions. The unique linker regions identified from the 2D and MD defensins are shown in Table 3. SEQ ID NOs: 103-152 represent nucleotide sequences encoding these identified defensin linker regions, and SEQ ID NOs: 153-202 represent the corresponding polypeptide sequences of these defensin linker regions. As can be seen in Table 3, there were 50 unique linker region DNA and protein sequences identified from these MD defensins since two of the linker regions for the 4D defensin (Zm_AFP100) are the same (SEQ ID NOs: 152 and 202). N-terminal TS sequences and C-terminal extension sequences (when present) for each of these identified MD defensins are further shown by sequence position annotations in Tables 1 and 2 above. The lengths of the TS sequences (if present) were observed to vary from a few amino acids to over 30 amino acids, and the C-terminal extension sequence was generally absent from the identified 2D defensins but was present in a 2D defensin (Zm_AFP101) and a 4D defensin (Zm_AFP100) at a variable length of about 35-50 amino acids. Most of the linkers were found to be proline-rich, while others were enriched with glycine or charged amino acids. Many of the linkers were approximately 10-20 amino acids in length, but a small subset of linkers had either very short linkers of only a few amino acids or longer linker sequence lengths of 20-65 amino acids.

TABLE 32
D and MD Defensin Linker Regions.

| Locus ID | Linker ID | DNA SEQ ID NO | Protein SEQ ID NO |
|---|---|---|---|
| ARAly_AFP26 | ARAly26L10 | 103 | 153 |
| At_AFP10 | At10L18 | 104 | 154 |
| At_AFP11 | At11L19 | 105 | 155 |
| At_AFP12 | At12L20 | 106 | 156 |
| At_AFP8 | At8L21 | 107 | 157 |
| At_AFP9 | At9L22 | 108 | 158 |
| BASsc_AFP21 | BASsc21L23 | 109 | 159 |
| Bn_AFP35 | Bn35L11 | 110 | 160 |
| Bn_AFP36 | Bn36L1 | 111 | 161 |
| Bn_AFP47 | Bn47L2 | 112 | 162 |
| Bn_AFP74 | Bn74L3 | 113 | 163 |
| Bn_AFP75 | Bn75L13 | 114 | 164 |
| Bn_AFP76 | Bn76L3 | 113 | 163 |
| Bn_AFP79 | Bn79L7 | 115 | 165 |
| Bn_AFP80 | Bn80L7 | 115 | 165 |
| Br_AFP1 | Br1L24 | 116 | 166 |
| Br_AFP2 | Br2L25 | 117 | 167 |
| CARpa_AFP1 | CARpa1L26 | 118 | 168 |
| CARpa_AFP2 | CARpa2L27 | 119 | 169 |
| CARpa_AFP3 | CARpa3L28 | 120 | 170 |
| CITcl_AFP10 | CITcl10L29 | 121 | 171 |
| CITcl_AFP11 | CITcl11L30 | 122 | 172 |
| CITcl_AFP2 | CITcl2L17 | 123 | 173 |
| CITcl_AFP3 | CITcl3L14 | 124 | 174 |
| CITsi_AFP1 | CITsi1L31 | 125 | 175 |
| CITsi_AFP2 | CITsi2L32 | 126 | 176 |
| CUCme_AFP1 | CUCme1L33 | 127 | 177 |
| CUCsa_AFP3 | CUCsa3L34 | 128 | 178 |
| Gm_AFP1 | Gm1L35 | 129 | 179 |
| Gm_AFP2 | Gm2L36 | 130 | 180 |
| MALdo_AFP11 | MALdo11L12 | 131 | 181 |
| Mt_AFP14 | Mt14L6 | 132 | 182 |
| Mt_AFP60 | Mt60L4 | 133 | 183 |
| Mt_AFP65 | Mt65L8 | 134 | 184 |
| Mt_AFP66 | Mt66L15 | 135 | 185 |
| Mt_AFP67 | Mt67L16 | 136 | 186 |
| Mt_AFP77 | Mt77L5 | 137 | 187 |
| Mt_AFP78 | Mt78L9 | 138 | 188 |
| PORol_AFP1 | PORol1L37 | 139 | 189 |
| PORol_AFP2 | PORol2L38 | 140 | 190 |
| PORol_AFP27 | PORol27L39 | 141 | 191 |
| PRUpe_AFP1 | PRUpe1L40 | 142 | 192 |
| RAPra_AFP23 | RAPra23L41 | 143 | 193 |
| RAPra_AFP24 | RAPra24L42 | 144 | 194 |
| RAPra_AFP25 | RAPra25L43 | 145 | 195 |
| RAPra_AFP26 | RAPra26L44 | 146 | 196 |
| RAPra_AFP27 | RAPra27L45 | 147 | 197 |
| ROSbl_AFP11 | ROSbl11L46 | 148 | 198 |
| TRIre_AFP5 | TRIre5L47 | 149 | 199 |
| Zm_AFP101 | Zm101L49 | 150 | 200 |
| Zm_AFP100 L1 | Zm100L48 | 151 | 201 |
| Zm_AFP100 L2 | Zm100L50 | 152 | 202 |
| Zm_AFP100 L3 | Zm100L50 | 152 | 202 |

### Example 4. Design of Synthetic Multi-Domain Defensins

[0061] In this example, synthetic homodimeric 2D defensins were designed and constructed to comprise two copies of a cognate single domain (1D) defensin, for example MtDef4 (nucleotide SEQ ID NO: 1029; polypeptide SEQ ID NO: 1128) or Coix22 (nucleotide SEQ ID NO: 990; polypeptide SEQ ID NO: 1089), connected by various linker regions derived from native 2D or MD defensins described herein. Synthetic multi-domain defensins comprising Coix22 defensin regions and having one of the nucleic acid sequences of SEQ ID NOs: 203-219 (encoding the protein sequences of SEQ ID NOs: 329-345, respectively) linked or connected by 17 different linker regions (identified in Table 4) were assessed in corn protoplasts. Synthetic multi-domain defensins comprising MtDef4 defensin regions and having nucleic acid sequences of SEQ ID NOs: 220-236 (encoding the protein sequences of SEQ ID NOs: 346-362, respectively) with the same linker regions as identified in Table 4 were also assessed in corn and soy protoplasts. Further reference is made to Tables 3 and 5 for the sequence identifiers corresponding to these 17 linker regions.

[0062] Also described in this example is the design of a synthetic heterodimeric defensin as set forth in nucleotide SEQ ID NO: 1155 and polypeptide SEQ ID NO: 1156 using Coix 22, linker Mt.AFP65 (nucleotide SEQ ID NO: 134; polypeptide SEQ ID NO: 184) and AMAru.AFP10 (nucleotide SEQ ID NO: 963; polypeptide SEQ ID NO: 1062). Stop codons were removed from the N-terminal defensin region of these synthetic multi-domain 2D defensins. The defensin N-terminal transit signal (TS) domain was maintained at the N-terminus of the N-terminal defensin region, but removed from the N-terminus of the C-terminal defensin region. Diagrammatic examples of these synthetic defensins are shown in FIG. 1 (L1, L2 and L3 refer to linkers derived from different 2D defensins identified herein).

TABLE 4
Homodimeric synthetic 2D using MtDef4 or Coix22 defensins

| Nucle- | | | | | | | | | |
|---|---|---|---|---|---|---|---|---|---|
| otide | Protein | | | Protein | Protein | Protein | Protein | Protein | Protein |
| SEQ | SEQ | | | TS | TS | MP | MP | Linker | Linker |
| ID NO | ID NO | Template ID | Linker ID | Start | End | Start | End | Start | End |
| 203 | 329 | Cl22FL_ARAly26L10_Cl22D1 | ARAly26L10 | 1 | 31 | 32 | 80 | 81 | 87 |
| 204 | 330 | Cl22FL_Bn35L11_Cl22D1 | Bn35L11 | 1 | 31 | 32 | 80 | 81 | 90 |
| 205 | 331 | Cl22FL_Bn36L1_Cl22D1 | Bn36L1 | 1 | 31 | 32 | 80 | 81 | 92 |
| 206 | 332 | Cl22FL_Bn47L2_Cl22D1 | Bn47L2 | 1 | 31 | 32 | 80 | 81 | 91 |
| 207 | 333 | Cl22FL_Bn74L3_Cl22D1 | Bn74L3 | 1 | 31 | 32 | 80 | 81 | 89 |
| 208 | 334 | Cl22FL_Bn75L1_Cl22D1 | Bn75L13 | 1 | 31 | 32 | 80 | 81 | 91 |
| 209 | 335 | Cl22FL_Bn79L7_Cl22D1 | Bn79L7 | 1 | 31 | 32 | 80 | 81 | 90 |
| 210 | 336 | Cl22FL_CITcl2L17_Cl22D1 | CITcl2L17 | 1 | 31 | 32 | 80 | 81 | 87 |
| 211 | 337 | Cl22FL_CITcl3L14_Cl22D1 | CITcl3L14 | 1 | 31 | 32 | 80 | 81 | 91 |
| 212 | 338 | Cl22FL_MALdo11L12_Cl22D1 | MALdo11L12 | 1 | 31 | 32 | 80 | 81 | 90 |
| 213 | 339 | Cl22FL_Mt14L6_Cl22D1 | Mt14L6 | 1 | 31 | 32 | 80 | 81 | 87 |
| 214 | 340 | Cl22FL_Mt60L4_Cl22D1 | Mt60L4 | 1 | 31 | 32 | 80 | 81 | 93 |
| 215 | 341 | Cl22FL_Mt65L8_Cl22D1 | Mt65L8 | 1 | 31 | 32 | 80 | 81 | 90 |
| 216 | 342 | Cl22FL_Mt66L15_Cl22D1 | Mt66L15 | 1 | 31 | 32 | 80 | 81 | 92 |
| 217 | 343 | Cl22FL_Mt67L16_Cl22D1 | Mt67L16 | 1 | 31 | 32 | 80 | 81 | 89 |
| 218 | 344 | Cl22FL_Mt77L5_Cl22D1 | Mt77L5 | 1 | 31 | 32 | 80 | 81 | 94 |
| 219 | 345 | Cl22FL_Mt78L9_Cl22D1 | Mt78L9 | 1 | 31 | 32 | 80 | 81 | 90 |
| 220 | 346 | MtDef4FL_ARAly26L10_MtDef4D1 | ARAly26L10 | 1 | 29 | 30 | 76 | 77 | 83 |
| 222 | 348 | MtDef4FL_Bn36L1_MtDef4D1 | Bn36L1 | 1 | 29 | 30 | 76 | 77 | 88 |
| 223 | 349 | MtDef4FL_Bn47L2_MtDef4D1 | Bn47L2 | 1 | 29 | 30 | 76 | 77 | 87 |
| 224 | 350 | MtDef4FL_Bn74L3_MtDef4D1 | Bn74L3 | 1 | 29 | 30 | 76 | 77 | 85 |
| 225 | 351 | MtDef4FL_Bn75L13_MtDef4D1 | Bn75L13 | 1 | 29 | 30 | 76 | 77 | 87 |
| 226 | 352 | MtDef4FL_Bn79L7_MtDef4D1 | Bn79L7 | 1 | 29 | 30 | 76 | 77 | 86 |
| 227 | 353 | MtDef4FL_CITcl2L17_MtDef4D1 | CITcl2L17 | 1 | 29 | 30 | 76 | 77 | 83 |
| 228 | 354 | MtDef4FL_CITcl3L14_MtDef4D1 | CITcl3L14 | 1 | 29 | 30 | 76 | 77 | 87 |
| 229 | 355 | MtDef4FL_MALdo11L12_MtDef4D1 | MALdo11L12 | 1 | 29 | 30 | 76 | 77 | 86 |
| 230 | 356 | MtDef4FL_Mt14L6_MtDef4D1 | Mt14L6 | 1 | 29 | 30 | 76 | 77 | 83 |
| 231 | 357 | MtDef4FL_Mt60L4_MtDef4D1 | Mt60L4 | 1 | 29 | 30 | 76 | 77 | 89 |
| 232 | 358 | MtDef4FL_Mt65L8_MtDef4D1 | Mt65L8 | 1 | 29 | 30 | 76 | 77 | 86 |
| 233 | 359 | MtDef4FL_Mt66L15_MtDef4D1 | Mt66L15 | 1 | 29 | 30 | 76 | 77 | 88 |
| 234 | 360 | MtDef4FL_Mt67L16_MtDef4D1 | Mt67L16 | 1 | 29 | 30 | 76 | 77 | 85 |
| 235 | 361 | MtDef4FL_Mt77L5_MtDef4D1 | Mt77L5 | 1 | 29 | 30 | 76 | 77 | 90 |
| 236 | 362 | MtDef4FL_Mt78L9_MtDef4D1 | Mt78L9 | 1 | 29 | 30 | 76 | 77 | 86 |

| Nucle- | | | | | | | | | | |
|---|---|---|---|---|---|---|---|---|---|---|
| otide | Protein | Protein | DNA | DNA | DNA | DNA | DNA | DNA | DNA | DNA |
| SEQ | MP2 | MP2 | TS | TS | MP | MP | Linker | Linker | MP2 | MP2 |
| ID NO | Start | End | Start | End | Start | End | Start | End | Start | End |
| 203 | 88 | 136 | 1 | 93 | 94 | 240 | 241 | 261 | 262 | 408 |
| 204 | 91 | 139 | 1 | 93 | 94 | 240 | 241 | 270 | 271 | 417 |
| 205 | 93 | 141 | 1 | 93 | 94 | 240 | 241 | 276 | 277 | 423 |
| 206 | 92 | 140 | 1 | 93 | 94 | 240 | 241 | 273 | 274 | 420 |
| 207 | 90 | 138 | 1 | 93 | 94 | 240 | 241 | 267 | 268 | 414 |
| 208 | 92 | 140 | 1 | 93 | 94 | 240 | 241 | 273 | 274 | 420 |
| 209 | 91 | 139 | 1 | 93 | 94 | 240 | 241 | 270 | 271 | 417 |
| 210 | 88 | 136 | 1 | 93 | 94 | 240 | 241 | 261 | 262 | 408 |
| 211 | 92 | 140 | 1 | 93 | 94 | 240 | 241 | 273 | 274 | 420 |
| 212 | 91 | 139 | 1 | 93 | 94 | 240 | 241 | 270 | 271 | 417 |
| 213 | 88 | 136 | 1 | 93 | 94 | 240 | 241 | 261 | 262 | 408 |
| 214 | 94 | 142 | 1 | 93 | 94 | 240 | 241 | 279 | 280 | 426 |
| 215 | 91 | 139 | 1 | 93 | 94 | 240 | 241 | 270 | 271 | 417 |
| 216 | 93 | 141 | 1 | 93 | 94 | 240 | 241 | 276 | 277 | 423 |
| 217 | 90 | 138 | 1 | 93 | 94 | 240 | 241 | 267 | 268 | 414 |
| 218 | 95 | 143 | 1 | 93 | 94 | 240 | 241 | 282 | 283 | 429 |
| 219 | 91 | 139 | 1 | 93 | 94 | 240 | 241 | 270 | 271 | 417 |
| 220 | 84 | 130 | 1 | 87 | 88 | 228 | 229 | 249 | 250 | 390 |
| 222 | 89 | 135 | 1 | 87 | 88 | 228 | 229 | 264 | 265 | 405 |
| 223 | 88 | 134 | 1 | 87 | 88 | 228 | 229 | 261 | 262 | 402 |
| 224 | 86 | 132 | 1 | 87 | 88 | 228 | 229 | 255 | 256 | 396 |
| 225 | 88 | 134 | 1 | 87 | 88 | 228 | 229 | 261 | 262 | 402 |
| 226 | 87 | 133 | 1 | 87 | 88 | 228 | 229 | 258 | 259 | 399 |
| 227 | 84 | 130 | 1 | 87 | 88 | 228 | 229 | 249 | 250 | 390 |
| 228 | 88 | 134 | 1 | 87 | 88 | 228 | 229 | 261 | 262 | 402 |
| 229 | 87 | 133 | 1 | 87 | 88 | 228 | 229 | 258 | 259 | 399 |
| 230 | 84 | 130 | 1 | 87 | 88 | 228 | 229 | 249 | 250 | 390 |
| 231 | 90 | 136 | 1 | 87 | 88 | 228 | 229 | 267 | 268 | 408 |
| 232 | 87 | 133 | 1 | 87 | 88 | 228 | 229 | 258 | 259 | 399 |
| 233 | 89 | 135 | 1 | 87 | 88 | 228 | 229 | 264 | 265 | 405 |
| 234 | 86 | 132 | 1 | 87 | 88 | 228 | 229 | 255 | 256 | 396 |
| 235 | 91 | 137 | 1 | 87 | 88 | 228 | 229 | 270 | 271 | 411 |
| 236 | 87 | 133 | 1 | 87 | 88 | 228 | 229 | 258 | 259 | 399 |

### Example 5. Protein Accumulation of 1D Versus 2D Defensins in Corn and Soy Plant Cells

### A. Protein Accumulation in Corn Protoplasts

[0063] Select synthetic homodimeric 2D defensins described in Example 4 were synthesized and delivered in a pUC57 cloning vector. Polymerase chain reaction (PCR) amplification and restriction digestion were used to amplify sequences encoding the synthetic 2D defensins from the pUC57 vectors, which were then ligated into a protoplast expression vector comprising a 35S promoter linked to the synthetic 2D defensin coding sequences. Protoplasts isolated from corn leaf mesophyll tissues were transformed with the protoplast expression plasmid vectors expressing native 1D Coix22 or synthetic 2D defensins comprising Coix22 defensin domains/regions connected by a linker region. For these synthetic 2D constructs, the homodimeric Coix22 defensin regions were heterologous with respect to the linker region. Following transformation, the protoplasts were lysed and the total proteins were subjected to standard Western immunoblotting using rabbit polyclonal antibodies raised against the native 1D Coix22. A goat anti-rabbit antibody conjugated to horseradish peroxidase (HRP) was used as secondary antibody and the blots were visualized with the Super Signal West Femto kit (Thermo Fisher Scientific, Waltham, Mass.). Following Western blotting, the membranes were subjected to Coomassie staining to confirm equal sample loading. Dilutions of a purified full length CI_AFP22 were western blotted and the resulting bands were subject to densitometry imaging (Imager Lab 5.1) and used to create a standard curve. The standard curve was then used as a basis for comparison to quantify the 1D and 2D CI_AFP22 proteins that were expressed in corn protoplasts.

[0064] Protein accumulation of homodimeric Coix22 domains in combination with various heterologous linker sequences (see Table 4) were compared with protein accumulation for Coix22 1D defensin components. In these experiments, many of the synthetic 2D defensin proteins appear to accumulate to greater levels than their 1D defensin counterparts. Although one of the synthetic 2D defensins tested, homodimeric Coix22 2D linked by Mt77L5 (nucleic acid SEQ ID NO: 218; protein SEQ ID NO: 344), was cleaved in both soy and corn protoplasts, no cleavage product was observed for the remainder of the synthetic 2D Coix22 defensins tested. Accordingly, it is proposed that linker regions may be leveraged to enhance accumulation of 2D and MD defensins in plants to enable more effective control of plant pathogens and/or pests.

### B. Protein Accumulation in Transgenic Soybean Plants

[0065] Transgenic soybean plants expressing Coix22 and Six Coix22 homodimeric 2D defensins with different heterologous linkers were established, and samples were collected at V2 and lyophilized prior to RNA and protein quantification. Protein quantification was performed using an indirect ELISA with a rabbit IgG primary antibody raised against the protein of interest and an anti-rabbit goat secondary antibody. Two concentrations of standard protein were used to calculate protein detected which is then normalized by total protein extracted. The QuantiGene technology measures RNA directly via a nucleic acid hybridization platform in which target RNAs are captured through cooperative binding of multiple oligonucleotide probes that are conjugated to magnetic microbeads. Cooperative binding of the multiple oligonucleotide probes with specificity for the target sequence results in exceptionally high assay specificity. Detection of this oligonucleotide complex occurs through amplification of a branched DNA amplifier and fluorescent signal, which is counted digitally by high-throughput flow cytometry sorting of the microbead. The results of RNA and Protein levels are shown in FIG. 2. While the variance in RNA is not significant between the 1D coix22 and the homodimeric Coix22 2D defensins, three of the five 2D proteins expressed at higher levels than the single domain, even after normalizing for the difference in protein size (2.25-fold increase for the 2D defensin using linker Bn36L1, 2-fold for the 2D defensin using linker Bn35L1, and 1.6-fold for the 2D defensin using linker CITcl2L17). These results demonstrate that multiple domains may help in protein accumulation through increased stability in transgenic soybean plants.

### Example 6. Methods for Assessing Activity of Multi-Domain Defensins

[0066] In this example, synthetic 2D defensins and their 1D defensin counterparts were tested for their ability to inhibit growth of several fungal species. The defensins were expressed in Pichia yeast cells and purified for use in fungal plate assays as described below.

### Defensin Production Using Pichia Cells

[0067] Constructs designed for Pichia and containing a Pichia signal peptide were synthesized by Bio Basic Inc. For clarity, this “Pichia signal peptide” used for these experiments is different than the N-terminal TS sequence of defensin proteins and may be present in addition to the TS sequence. The Pichia signal peptide is used to enable secretion of the synthesized protein from the Pichia cells to facilitate collection and protein purification. Approximately 5 μg of DNA was linearized, purified, and transformed into electrocompetent PichiaPink™ cells (Thermo Scientific) by electroporation. After recovery, the cells were plated onto Pichia Adenine Dropout (PAD) selection plates and incubated at 29° C. for 3 days. One colony from each transformation was cultured for 3 days for outgrowth. The cell pellets were then collected and induced with media containing methanol. The cells were cultured and supplemented with methanol daily for 3 additional days. The cell pellets were collected and the media used for the purification. Methods for purification of the Pichia-expressed defensin proteins depended on their expected isoelectric point (pI).

[0068] Purification of Defensins Having pI>7 Using Cation Exchange.

[0069] Media was diluted at a ratio of 8:1 with 50 mM sodium acetate at pH 5.0 and passed over SP sepharose resin (GE Healthcare #17-0729-01) using a vacuum manifold. The resin was washed with 50 mM sodium acetate at pH 5.0 and eluted in twice the resin volume with 50 mM sodium acetate at pH 5.0 containing 1M NaCl.

[0070] Purification of Defensins Having pI<7 Using Anion Exchange.

[0071] Media was diluted at a ratio of 8:1 with 50 mM CHES at pH 9.0 and passed over Q sepharose resin (GE Healthcare #17-0510-01) using a vacuum manifold. The resin was washed with 50 mM CHES at pH 9.0 and eluted in twice the resin volume with 50 mM CHES at pH 9.0 containing 1M NaCl.

[0072] Buffer Exchange and Concentration.

[0073] The purified protein was dialyzed overnight into 8 mM Tris HCl at pH 8 using Pura-A-Lyzer Maxi 3500 Dialysis tubes (Sigma #PURX35050). The resulting solution was concentrated by drying in the Pura-A-Lyzer tubes until a final volume of 400-450 μl was achieved.

### Fungal Growth Conditions

[0074] Fungi were first grown according to the conditions in Table 5 for 3-4 weeks or less depending on fungal species as indicated.

TABLE 6
Fungal Growth Conditions.

| | | Lighting and Temperature | |
|---|---|---|---|
| Fungus | Media | Conditions | Time before use |
| Fusarium | 0.25x Potato | 12 hour diurnal cycle at 19° C. | 21-28 days |
| graminearum | Dextrose Agar | in the dark and 23° C. with | |
| (Gibberella stalk rot) | | 100 μmol light | |
| Fusarium | 0.25x Potato | 12 hour diurnal cycle at 19° C. | 21-28 days |
| verticilloides | Dextrose Agar | in the dark and 23° C. with | |
| (Fusarium stalk rot) | | 100 μmol light | |
| Colletotrichum | 1x oatmeal | 12 hour diurnal cycle at 19° C. | 21-28 days |
| graminicola | agar | in the dark and 23° C. with | |
| (Anthracnose stalk | | 100 μmol light | |
| rot) | | | |
| Stenocarpella maydis | 1X PDA + | 12 hour diurnal cycle at 26° C. | 21-28 days |
| (Diplodia ear rot) | Cefotaxime | with 100 μmol of light | |
| | | during the daytime period | |
| Phakopsora | Culture in | 14 hour diurnal light cycle | At least 12 days after |
| pachyrhizi (Soy Asian | planta | with 19° C. in the dark and | plant inoculation |
| rust) | | 22° C. with 500 μmol light | |
| | | during the daytime period, | |
| | | 75% relative humidity | |

### Plate Functional Assay for Fungal Growth Inhibition

[0075] Following expression and purification of the 1D and 2D defensin proteins and growth of the fungal species in culture, the ability of the individual defensins to inhibit fungal growth was tested in plate assays. On the day of the growth test assay, fungi were collected in test media, filtered, and resuspended to the appropriate titer as shown in Table 7.

TABLE 7
Conditions for Fungal Growth Inhibition Assay.

| | Test | Filter | | |
|---|---|---|---|---|
| Fungus | media | condition | Test media | Titer |
| Fusarium | 0.05% | 100 μm | 0.5x POTATO | 4e⁴ |
| graminearum | Triton | Steriflip | DEXTROSE | spores/ml |
| (Gibberella stalk rot) | X100 | filter | BROTH | |
| Fusarium verticilloides | 0.05% | 100 μm | 0.5x POTATO | 6.5e⁴ |
| (Fusarium stalk rot) | Triton | Steriflip | DEXTROSE | spores/ml |
| | X100 | filter | BROTH | |
| Colletotrichum | 0.05% | 100 μm | 2x POTATO | 1e⁵ |
| graminicola | Triton | Steriflip | DEXTROSE | spores/ml |
| (Anthracnose stalk rot) | X100 | filter | BROTH | |
| Stenocarpella maydis | 0.05% | 100 μm | 2x POTATO | 6.5e⁴ |
| (Diplodia ear rot) | Triton | Steriflip | DEXTROSE | spores/ml |
| | X100 | filter | BROTH | |
| Phakopsora pachyrhizi | 0.05% | 20 μm and 60 | 0.5x POTATO | 5e⁴ |
| (Soy Asian rust) | Triton | μm Steriflip | DEXTROSE | spores/ml |
| | X100 | filter | BROTH | |

[0076] 20 μl of each fungal solution according to Table 7 was added to 20 μl of the purified defensin protein to be tested in 20 mM Tris HCL, pH 8.0, in 96 well view plates (Perkin Elmer). Plates were sealed with parafilm and incubated in a clear humidity box for a predetermined period of time, temperature and conditions according to Table 8, before being imaged for fungal growth in the presence of the defensin.

TABLE 8
Conditions and Times for Incubation of Fungi with Defensins.

| | Lighting and | |
|---|---|---|
| Fungus | Temperature Conditions | Time |
| Fusarium | 12 hour diurnal cycle at 23° C. | 24 hours |
| graminearum | with 100 μmol of light during | |
| (Gibberella stalk rot) | the daytime period | |
| Fusarium | 12 hour diurnal cycle at 23° C. | 24 hours |
| verticilloides | with 100 μmol of light during | |
| (Fusarium stalk rot) | the daytime period | |
| Colletotrichum | 12 hour diurnal cycle at 26° C. | 24 hours |
| graminicola | with 100 μmol of light during | |
| (Anthracnose stalk rot) | the daytime period | |
| Stenocarpella maydis | 12 hour diurnal cycle at 26° C. | 24 hours |
| (Diplodia ear rot) | with 100 μmol of light during | |
| | the daytime period | |
| Phakopsora | 12 hour diurnal cycle at 23° C. | 16 hours |
| pachyrhizi | with 100 μmol of light during | |
| (Soy Asian rust) | the daytime period | |

### Imaging Fungal Growth

[0077] The plates were visually imaged using the Perkin Elmer Operetta High Content Imager, using brightfield settings and a 10× objective lens. Depending on the particular fungal species being tested, the stored images were scored according to the ratings or criteria provided in Table 9. Two replicates and up to 4 fields per replicates were averaged for each of the visual inhibition scores.

TABLE 9
Scoring of Inhibition of Fungal Growth.

| Fungus | Scoring |
|---|---|
| Fusarium graminearum | 0-Germinated, hyphal elongation and no activity |
| (Gibberella stalk rot) | 1-Germinated and hyphal elongation of ≥250 μm |
| | 2-Germinated and hyphal elongation of 100-250 μm |
| | 3-germinated and hyphal elongation of 50-100 μm |
| | 4-no germination >80% of spores; hyperbranching “starburst” phenotype |
| | with hyphal elongation <50 μm |
| Fusarium verticilloides | 0-Germinated, hyphal elongation and no activity |
| (Fusarium stalk rot) | 1-Germinated and hyphal elongation of ≥400 μm |
| | 2-Germinated and hyphal elongation of 200-400 μm |
| | 3-germinated and hyphal elongation of 100-200 μm |
| | 4-no germination >50% of spores; hyperbranching “starburst” phenotype |
| | with hyphal elongation <100 μm |
| Colletotrichum | 0-Germinated and hyphal elongation ≥ 400 μm |
| graminicola | 1-Germinated and hyphal elongation of 200-400 μm |
| (Anthracnose stalk rot) | 2-Germinated and hyphal elongation of 125-200 μm |
| | 3-germinated and hyphal elongation of <125 μm |
| | 4-no germination |
| Stenocarpella maydis | 0-Germinated and hyphal elongation ≥ 400 μm |
| (Diplodia ear rot) | 1-Germinated and hyphal elongation of 200-400 μm |
| | 2-Germinated and hyphal elongation of 125-200 μm |
| | 3-germinated and hyphal elongation of <125 μm |
| | 4-activity with no germination >25% of spores; |
| | hyphal elongation < 25 μm |
| Phakopsora pachyrhizi | 0-0% Inhabitation ≥ 330 μm |
| (Soy Asian rust) | 1-25% Inhabitation 330-250 um |
| | 2-20-75% Inhabitation 100-250 μm |
| | 3-75-100% Inhabitation 0-100 μm |

### Example 7. Fungal Inhibition Activity of Multi-Domain Defensins

[0078] A. 2D Defensins Inhibit Fungal Growth in Plate Assay

[0079] Eighteen native 2D defensins of the invention were tested in the above in vitro plate assay and compared with their 1D defensin counterparts to determine whether the 2D defensins are active against the fungal pathogens listed in Table 9. These 19 2D defensins are identified in Table 10, and their sequences are provided above in Tables 1 and 2 (their linker sequences are also provided in Table 3; and corresponding protein sequences may be determined from the nucleotide sequences listed). The anti-fungal activities of the 2D defensins were also compared to their cognate or component 1D defensins to determine if their potency and spectrum of activity were enhanced relative to their 1D components. The 1D or 2D defensins tested were expressed in Pichia and purified as described above. The fungal inhibition scores for each defensin were calculated as an average of the reps performed.

TABLE 10
Fungal Inhibition Activity of 2D Defensins.

| NUC | | | | | Colletot- | | Fusarium | | | |
|---|---|---|---|---|---|---|---|---|---|---|
| SEQ | protein | | | | richum | Fusarium | verticil- | Phakopsora | Stenocarpella | |
| ID NO | name | locus ID | Domain | Reps | graminicola | graminearum | lioides | pachyrhizi | maydis | >20 ppm |
| 1 | PHT001688 | ARAly_AFP26 | D1D2 | 2 | 0 | 1 | 0 | 0 | 1 | not |
| | | | | | | | | | | known |
| 8 | PHT002159 | Bn_AFP35 | D1D2 | 2 | 0 | 0 | 0 | 0 | 0 | not |
| | | | | | | | | | | known |
| 9 | PHT002230 | Bn_AFP36 | D1D2 | 2 | 0 | 0 | 0 | | | not |
| | | | | | | | | | | known |
| 10 | PHT002187 | Bn_AFP47 | D1D2 | 2 | 0 | 0 | 0 | 0 | 0.5 | not |
| | | | | | | | | | | known |
| 11 | PHT002172 | Bn_AFP74 | D1D2 | 2 | 0 | 0 | 0 | 0 | 0 | not |
| | | | | | | | | | | known |
| 12 | PHT002235 | Bn_AFP75 | D1D2 | 2 | 0 | 0 | 0 | | 0 | not |
| | | | | | | | | | | known |
| 13 | PHT002236 | Bn_AFP76 | D1D2 | 2 | 0 | 0 | 0 | 0 | 0 | not |
| | | | | | | | | | | known |
| 14 | PHT002182 | Bn_AFP79 | D1D2 | 2 | 0 | 0 | 0 | 0 | 0.5 | not |
| | | | | | | | | | | known |
| 15 | PHT002219 | Bn_AFP80 | D1D2 | 2 | 0 | 0 | 0 | 0 | 0 | not |
| | | | | | | | | | | known |
| 24 | PHT002366 | CITcl_AFP3 | D1D2 | 2 | 0 | 0 | 0 | 0.5 | 1.5 | not |
| | | | | | | | | | | known |
| 31 | PHT002131 | MAFdo_AFP11 | D1D2 | 2 | 0 | 1.5 | 0.5 | 1.5 | 1 | yes |
| 32 | PHT002270 | Mt_AFP14 | D1D2 | 2 | 0 | 4 | 2.5 | | 2 | yes |
| 33 | PHT002295 | Mt_AFP60 | D1D2 | 2 | 0 | 0 | 0 | 0 | 0 | not |
| | | | | | | | | | | known |
| 34 | PHT002294 | Mt_AFP65 | D1D2 | 2 | 0 | 0.5 | 0 | 0 | 0 | not |
| | | | | | | | | | | known |
| 35 | PHT002293 | Mt_AFP66 | D1D2 | 2 | 0 | 0 | 0 | 0 | 0 | not |
| | | | | | | | | | | known |
| 37 | PHT002296 | Mt_AFP77 | D1D2 | 2 | 0 | 1 | 0 | 0 | 0.5 | yes |
| 38 | PHT002297 | Mt_AFP78 | D1D2 | 2 | 0 | 0 | 0 | 0 | 1 | not |
| | | | | | | | | | | known |
| — | Empty Vector | negative control | N/A | 4 | 0 | 0.25 | 0 | 0 | 1.5 | no |
| 1153 | MEDsa.AFPm1 | positive control | N/A | 4 | 2.75 | 3.7 | 2.3 | 1.25 | 2.7 | yes |

[0080] As shown in Table 10, some of these native 2D defensins were able to inhibit growth of fungal pathogens tested in this plate functional assay. Protein concentrations (ppm) of some of the defensin preparations used in the fungal growth assay were measured and compared. In this experiment, at least one of the different 2D defensins was found to have activity against each of the fungal species tested. In cases where the protein concentration was measured and determined to be greater than 20 ppm, inhibitory activity against one or more pathogens was observed for that defensin protein.

[0081] B. Transgenic Corn Plants Expressing MALdo_AFP11 have Enhanced Disease Resistance

[0082] Transgenic corn plants expressing MALdo_AFP11 (nucleotide SEQ ID NO: 31 and polypeptide SEQ ID NO: 82) were generated and grown in the greenhouse. At the VT growth stage, two nodes were infected by wounding the stalk and injecting a suspension of Colletotrichum graminicola inoculum into the wound. Corn plants were evaluated ˜2-3 weeks after inoculation. Stalks were harvested, leaves were removed and the stalks were split longitudinally. Disease severity was reported as the percent necrosis of the cut surface and is compared to the percent necrosis of non-transformed plants. Five transgenic corn events out of 9 transgenic corn events tested were shown to have significant disease reduction at p-value <0.05 as compared to controls.

### Example 8. Fungal Inhibition by Synthetic Multi-Domain Defensins

[0083] Synthetic 2D defensins comprising two identical defensin regions connected or bridged together by a linker region were compared with 1D defensins. As shown in Example 5 above, many of these longer 2D defensins exhibited increased accumulation relative to their 1D counterparts when expressed in the corn and soy protoplast system, perhaps due to their increased size. The synthetic 2D defensins that accumulated to higher levels in protoplasts also tended to have enhanced or altered activity against fungal pathogens in the plate assays.

[0084] Coix22 (PHT000006; nucleotide SEQ ID NO: 990; polypeptide SEQ ID NO: 1089) and MtDef4 (PHT000025; nucleotide SEQ ID NO: 1029; polypeptide SEQ ID NO: 1128) are 1D defensins shown to be active against fungal pathogens. These Coix22 and MtDef4 domains were fused with heterologous defensin linker regions to create novel synthetic 2D defensins similar to those expressed in Examples 4 and 5 above but modified for expression in Pichia. Seventeen unique defensin linkers from 2D defensins identified from different plant species were tested for their ability to create active 2D defensins. Each synthetic defensin was expressed from a Pichia expression vector, and proteins were purified and tested in vitro for activity as described above. The 1D Coix22 and MtDef4 defensins were used as controls. The fungal inhibition activities or scores for these synthetic 2D defensins are shown in Tables 11, 12, and 13. Tables 12 and 13 provide these fungal inhibition activities or scores standardized to 1 μM or 0.5 μM protein concentration. Standardization of these fungal inhibition scores allows for a more direct comparison of the intrinsic anti-fungal activities of these 2D and 1D defensins, apart from the effects of their variable protein accumulation levels.

TABLE 11
Fungal Inhibition Activity of Synthetic 2D defensins.

| Defensin | | | final | estimate | | | | | |
|---|---|---|---|---|---|---|---|---|---|
| PRT SEQ | Protein | | assay | of Pichia | C. | F. | F. | P. | S. |
| ID NO | name | linker | cone (μM) | processing | graminicola | graminearum | verticilloides | pachyrhizi | maydis |
| — | Empty Vector | (Empty) | 5 | (Empty) | 0 | 1.5 | 0.5 | 0 | 1 |
| 1154 | MEDsa.AFPm1 | (Empty) | 3.72 | (Empty) | 4 | 3 | 3 | 3 | 3 |
| 1089 | PHT000006 | none | 5 | N/A | 3 | 1 | 0 | 2 | 2.5 |
| 365 | PHT002411 | PPTPPSPFrRP | 5 | not cleaved | 3 | 2.5 | 2.5 | 2 | 1.5 |
| 366 | PHT002412 | GPPSPTPPHHK | 5 | cleaved | 3.5 | 1 | 2 | 1 | 2.5 |
| 373 | PHT002416 | APKKVEP | 3.96 | not cleaved | 3 | 2 | 1 | 2 | 0.5 |
| 369 | PHT002417 | NNESASPASK | 1.75 | not cleaved | 2.5 | 2 | 1 | 1 | 1 |
| 375 | PHT002418 | GGKAGKKAPK | 5 | not cleaved | 2.5 | 4 | 3.5 | 2 | 1 |
| 363 | PHT002420 | ASIKPAK | 2.86 | cleaved | 2 | 1 | 2 | 0.5 | 2 |
| 364 | PHT002529 | ATPPTPTPPK | 5 | not cleaved | 3 | 3 | 2.5 | 2 | 0.5 |
| 372 | PHT002530 | GPPSPPPYSK | 5 | cleaved | 2 | 1.5 | 0.5 | 2 | 3 |
| 368 | PHT002531 | EPPSLTSTPLN | 5 | not cleaved | 2 | 2.5 | 2 | 2 | 0.5 |
| 377 | PHT002534 | GGKPGKKAP | 1.1 | not cleaved | 1 | 1.5 | 1 | 0 | 2.5 |
| 370 | PHT002535 | AGRGDKK | 5 | not cleaved | 2 | 1 | 1 | 0.5 | 2.5 |
| — | Tris | (Empty) | (Empty) | (Empty) | 0.9 | 0.7 | 0 | 0.3 | 0.4 |

TABLE 12
Fungal Inhibition Activity of Synthetic 2D Defensins Standardized to a Protein Concentration of 1 μM.

| Defensin | | | final | estimate | | | | | |
|---|---|---|---|---|---|---|---|---|---|
| PRT SEQ | Protein | | assay | of Pichia | C. | F. | F. | P. | S. |
| ID NO | name | linker | cone (μM) | processing | graminicola | graminearum | verticilloides | pachyrhizi | maydis |
| — | Empty Vector | (Empty) | 1 | (Empty) | 1.5 | 1 | 0 | 0 | 1 |
| 1154 | MEDsa.AEPm1 | (Empty) | 1 | (Empty) | 2.5 | 3 | 2.5 | 0.5 | 3 |
| 1089 | PHT000006 | none | 1 | N/A | 0.5 | 0 | 1 | 0.5 | 2 |
| 365 | PHT002411 | PPTPPSPPTRP | 1 | not cleaved | 1.5 | 0 | 1 | 1 | 3 |
| 366 | PHT002412 | GPPSPTPPHHK | 1 | cleaved | 1.5 | 0 | 1 | 1 | 2.5 |
| 373 | PHT002416 | APKKVEP | 1 | not cleaved | 1 | 1 | 2 | 0.5 | 3 |
| 369 | PHT002417 | NNESASPASK | 1 | not cleaved | 1.5 | 1 | 1 | 0 | 1.5 |
| 375 | PHT002418 | GGKAGKKAPK | 1 | not cleaved | 2 | 1 | 1.5 | 0 | 2 |
| 363 | PHT002420 | ASIKPAK | 1 | cleaved | 2 | 1 | 1.5 | 0.5 | 1.5 |
| 364 | PHT002529 | ATPFrrrppK | 1 | not cleaved | 2.5 | 0 | 1 | 1 | 2 |
| 372 | PHT002530 | GPPSPPPYSK | 1 | cleaved | 1.5 | 1 | 0.5 | 0.5 | 1.5 |
| 368 | PHT002531 | EPPSLTSTPLN | 1 | not cleaved | 1.5 | 0 | 1 | 1 | 1 |
| 377 | PHT002534 | GGKPGKKAP | 1 | not cleaved | 0 | 1 | 0.5 | 0 | 0 |
| 370 | PHT002535 | AGRGDKK | 1 | not cleaved | 1 | 0 | 0 | 0 | 1.5 |

TABLE 13
Fungal Inhibition Activity of Synthetic 2D Defensins Standardized to a Protein Concentration of 0.5 μM.

| Defensin | | | final | estimate | | | | | |
|---|---|---|---|---|---|---|---|---|---|
| PRT SEQ | Protein | | assay | of Pichia | C. | F. | F. | P. | S. |
| ID NO | name | linker | cone (μM) | processing | graminicola | graminearum | verticilloides | pachyrhizi | maydis |
| — | Empty Vector | (Empty) | 0.5 | (Empty) | 1 | 0 | 0 | 0 | 1.5 |
| 1154 | MEDsa.AFPm1 | (Empty) | 0.5 | (Empty) | 1 | 3 | 1.5 | 1 | 2.5 |
| 1089 | PHT000006 | none | 0.5 | N/A | 2.5 | 0.5 | 1 | 1 | 1 |
| 365 | PHT002411 | PPTPPSPPTRP | 0.5 | not cleaved | 2.5 | 0 | 1 | 1 | 2 |
| 366 | PHT002412 | GPPSPTPPHHK | 0.5 | cleaved | 2.5 | 0.5 | 1 | 0.5 | 2 |
| 373 | PHT002416 | APKKVEP | 0.5 | not cleaved | 0.5 | 0 | 1.5 | 1 | 1 |
| 369 | PHT002417 | NNESASPASK | 0.5 | not cleaved | 2.5 | 0 | 1 | 1.5 | 2.5 |
| 375 | PHT002418 | GGKAGKKAPK | 0.5 | not cleaved | 1 | 0.5 | 1 | 1 | 2 |
| 363 | PHT002420 | ASFKPAK | 0.5 | cleaved | 1 | 1 | 1.5 | 0.5 | 2.5 |
| 364 | PHT002529 | ATPPTPTPPK | 0.5 | not cleaved | 2 | 1 | 0.5 | 1.5 | 2.5 |
| 372 | PHT002530 | GPPSPPPYSK | 0.5 | cleaved | 0.5 | 0 | 1 | 1 | 2 |
| 368 | PHT002531 | EPPSLTSTPLN | 0.5 | not cleaved | 0 | 0 | 1 | 0 | 2 |
| 377 | PHT002534 | GGKPGKKAP | 0.5 | not cleaved | 0.5 | 1 | 1 | 0 | 1 |
| 370 | PHT002535 | AGRGDKK | 0.5 | not cleaved | 1 | 1 | 0 | 0 | 2.5 |

### Example 9. Fungal Inhibition by Synthetic Multi-Domain Defensins

[0085] As demonstrated in Example 8, defensin regions can be connected by a linker region sequence to create a functionally active synthetic or chimeric 2D defensin and tested for anti-fungal activity. Seventeen linker regions from different 2D defensins were tested in combination with five native 2D defensin regions by replacing the native linker region with one of the 16 heterologous linkers (one of the 17 linkers was the native linker for that 2D defensin). The five native 2D defensins were chosen from a set of 17 2D defensins based on the cysteines in the 2 defensin regions. Two defensins, Mt_AFP14 and Bn_AFP79, represented the most common 8:8 class of 2D defensins. Bn_AFP79 and Mt_AFP65 represented the 8:10 class, and Mt_AFP60 represented the 7:9 class of defensins. See Tables 1 and 2 providing sequence identifiers for these native 2D proteins. For 2D defensins, this x:y nomenclature refers to the relative number of cysteines in the two defensin regions. For example, the 8:10 class refers to a 2D defensin having 8 cysteines in the first defensin region and 10 cysteines in the second defensin region. A total of 80 constructs (16 heterologous linker regions in 5 native 2D defensins) and three controls were tested for fungal inhibition activity in the plate assay. Data available for 57 of these constructs is shown in Table 14 below. Each of the five native 2D defensins were also tested (i.e., without the linker swap). The results are shown in Table 14. Proteins were expressed in Pichia and purified as described above.

TABLE 14
Fungal Inhibition Activity of Synthetic Chimeric 2D Defensins.

| NUC | PRT | | Colletot- | | Fusarium | | | |
|---|---|---|---|---|---|---|---|---|
| SEQ | SEQ | | richum | Fusarium | verticil- | Stenocarpella | Phakopsora | protein |
| ID NO | ID NO | template_id | graminicola | graminearum | lioides | maydis | pachyrhizi | expression |
| 14 | 65 | BRANA.G1156000011.1 | 0 | 0 | 0 | 0 | 0 | N/A |
| 10 | 61 | BRANA.G181000052.1 | 0 | 0 | 0 | 0.5 | 0 | N/A |
| 32 | 83 | contig_21756_1.1 | 0 | 2.5 | 0 | 0 | 0 | N/A |
| 33 | 84 | Medtr2g037250.1 | 0 | 1.5 | 0 | 0 | 0 | N/A |
| 34 | 85 | Medtr2g037190.1 | 0 | 1 | 0 | 0 | 0 | N/A |
| 271 | 397 | Bn47D1_Bn35L11_Bn47D2 | | 0 | 0 | | 0 | band not |
| | | | | | | | | visible |
| 272 | 398 | Bn47D1_Bn36L1_Bn47D2 | 0 | 0 | 0 | 0 | 0 | band not |
| | | | | | | | | visible |
| 273 | 399 | Bn47D1_MALdo11L12_Bn47D2 | 0 | 0 | 0 | 0 | 0 | band not |
| | | | | | | | | visible |
| 274 | 400 | Bn47D1_Bn74L3_Bn47D2 | 0 | 0 | 0 | 0 | 0 | band not |
| | | | | | | | | visible |
| 275 | 401 | Bn47D1_Bn75L13_Bn47D2 | 0 | 0 | 0 | 2 | 0 | band not |
| | | | | | | | | visible |
| 276 | 402 | Bn47D1_Mt60L4_Bn47D2 | 0 | 0 | 0 | 0 | 0 | band not |
| | | | | | | | | visible |
| 277 | 403 | Bn47D1_Mt77L5_Bn47D2 | | 0 | 0 | 0 | 0 | band not |
| | | | | | | | | visible |
| 278 | 404 | Bn47D1_CITcl3L14_Bn47D2 | | 0 | 0 | | 0 | + |
| 279 | 405 | Bn47D1_Mt14L6_Bn47D2 | 0 | 0 | 0 | 0 | 0 | band not |
| | | | | | | | | visible |
| 280 | 406 | Bn47D1_Mt66L15_Bn47D2 | 0 | 0 | 0 | 0 | 0 | + |
| 281 | 407 | Bn47D1_Mt65L8_Bn47D2 | 0 | 0 | 0 | 0 | 0 | band not |
| | | | | | | | | visible |
| 282 | 408 | Bn47D1_Mt67L16_Bn47D2 | 0 | 0 | 0 | 0 | 0 | + |
| 283 | 409 | Bn47D1_Mt78L9_Bn47D2 | 0 | 0 | 0 | 0 | 0 | band not |
| | | | | | | | | visible |
| 284 | 410 | Bn47D1_CITcl2L17_Bn47D2 | 0 | 0 | 0 | 0 | 0 | band not |
| | | | | | | | | visible |
| 285 | 411 | Mt60D1_Bn36L1_Mt60D2 | 0 | 0 | 0 | 0 | 0 | band not |
| | | | | | | | | visible |
| 286 | 412 | Mt60D1_Bn47L2_Mt60D2 | 0 | 0 | 0 | 0 | 0 | + |
| 287 | 413 | Mt60D1_MALdo11L12_Mt60D2 | 0 | 0 | 0 | 0 | 0 | + |
| 288 | 414 | Mt60D1_Bn75L13_Mt60D2 | 0 | 0 | 0 | 3 | 0 | band not |
| | | | | | | | | visible |
| 289 | 415 | Mt60D1_Mt77L5_Mt60D2 | 0 | 0 | 0 | 0 | 0 | ++ |
| 290 | 416 | Mt60D14_CITcl3L14_Mt60D2 | 0 | 2 | 0 | 0 | 0 | ++ |
| 291 | 417 | Mt60D1_Mt14L6_Mt60D2 | 0 | 0 | 0 | 0 | 0 | band not |
| | | | | | | | | visible |
| 292 | 418 | Mt60D1_Bn79L7_Mt60D2 | 0 | 0 | 0 | 0 | 0 | band not |
| | | | | | | | | visible |
| 293 | 419 | Mt60D1_Mt66L15_Mt60D2 | 0 | 0 | 0 | 0 | 0 | ++ |
| 294 | 420 | Mt60D1_Mt65L8_Mt60D2 | 0 | 0.5 | 0 | 0 | 0 | ++ |
| 295 | 421 | Mt60D1_Mt78L9_Mt60D2 | 0 | 0 | 0 | 0 | 0 | + |
| 296 | 422 | Mt60D1_CITcl2L17_Mt60D2 | 0 | 0 | 0 | 0 | 0 | ++ |
| 297 | 423 | Mt14D1_Bn47L2_Mt14D2 | 0 | 2.5 | 1 | 0 | 0 | band not |
| | | | | | | | | visible |
| 298 | 424 | Mt14D1 _MALdo11L12_Mt14D2 | 0 | 1.5 | 1 | 0 | 0 | band not |
| | | | | | | | | visible |
| 299 | 425 | Mt14D1_Bn74L3_Mt14D2 | 0 | 4 | 1.5 | 1.5 | 0 | band not |
| | | | | | | | | visible |
| 300 | 426 | Mt14D1_Bn75L13_Mt14D2 | 0 | 2 | 0 | 0 | 0 | band not |
| | | | | | | | | visible |
| 301 | 427 | Mt14D1_Mt60L4_Mt14D2 | 0 | 3 | 1 | 1 | 0 | band not |
| | | | | | | | | visible |
| 302 | 428 | Mt14D1_Mt77L5_Mt14D2 | 0 | 1 | 0 | 0 | 0 | band not |
| | | | | | | | | visible |
| 303 | 429 | Mt14D1_CITcl3L14_Mt14D2 | 0 | 2.5 | 1.5 | 0 | 0 | ++ |
| 304 | 430 | Mt14D1_Mt78L9_Mt14D2 | 0 | 3.5 | 1.5 | 0 | 0 | band not |
| | | | | | | | | visible |
| 305 | 431 | Mt14D1_CITcl2L17_Mt14D2 | 0 | 0 | 0 | 0 | 0 | band not |
| | | | | | | | | visible |
| 306 | 432 | Bn79D1_Bn35L11_Bn79D2 | 0 | 0 | 0 | 0 | 0 | band not |
| | | | | | | | | visible |
| 307 | 433 | Bn79D1_Bn47L2_Bn79D2 | 0 | 0 | 0 | 0 | 0 | + |
| 308 | 434 | Bn79D1_Bn74L3_Bn79D2 | 0 | 0 | 0 | 0 | 0 | + |
| 309 | 435 | Bn79D1_Bn75L13_Bn79D2 | 0 | 0 | 0 | 0 | 0 | band not |
| | | | | | | | | visible |
| 310 | 436 | Bn79D1_Mt60L4_Bn79D2 | 0 | 0 | 0 | 0 | 0 | band not |
| | | | | | | | | visible |
| 311 | 437 | Bn79D1_Mt77L5_Bn79D2 | 0 | 0 | 0 | 0 | 0 | + |
| 312 | 438 | Bn79D1_Mt14L6_Bn79D2 | 0 | 0 | 0 | 0 | 0 | + |
| 313 | 439 | Bn79D1_Mt66L15_Bn79D2 | 0 | 0 | 0 | 0 | 0 | ++ |
| 314 | 440 | Bn79D1_Mt65L8_Bn79D2 | 0 | 0 | 0 | 0 | 0 | + |
| 315 | 441 | Bn79D1_Mt78L9_Bn79D2 | 0 | 0 | 0 | 0 | 0 | + |
| 316 | 442 | Bn79D1_CITcl2L17_Bn79D2 | 0 | 0 | 0 | 2.5 | 0 | + |
| 317 | 443 | Bn79D1_ARAly26L10_Bn79D2 | 0 | 0 | 0 | 0 | 0 | failed |
| | | | | | | | | transformation |
| 318 | 444 | Mt65D1_Bn35L11_Mt65D2 | 0 | 2 | 0 | 0 | 0 | + |
| 319 | 445 | Mt65D1_Bn36L1_Mt65D2 | 0 | 0 | 0 | 0 | 0 | band not |
| | | | | | | | | visible |
| 320 | 446 | Mt65D1_MALdo11L12_Mt65D2 | 0 | 2 | 1 | 0 | 0 | band not |
| | | | | | | | | visible |
| 321 | 447 | Mt65D1_Bn75L13_Mt65D2 | 0 | 0 | 0 | 0 | 0 | band not |
| | | | | | | | | visible |
| 322 | 448 | Mt65D1_Mt77L5_Mt65D2 | 0 | 0 | 0 | 0 | 0 | band not |
| | | | | | | | | visible |
| 323 | 449 | Mt65D1_CITcl3L14_Mt65D2 | 0 | 0.5 | 0 | 0 | 0 | band not |
| | | | | | | | | visible |
| 324 | 450 | Mt65D1_Bn79L7_Mt65D2 | 0 | 0 | 0 | | 0 | band not |
| | | | | | | | | visible |
| 325 | 451 | Mt65D1_Mt66L15_Mt65D2 | 0 | 0 | 0 | 0 | 0 | + |
| 326 | 452 | Mt65D1_Mt78L9_Mt65D2 | 0 | 0 | 0 | 0 | 0 | band not |
| | | | | | | | | visible |
| 327 | 453 | Mt65D1_CITcl2L17_Mt65D2 | 0 | 0 | 0 | 0 | 0 | band not |
| | | | | | | | | visible |
| 328 | 454 | Mt65D1_ARAly26L10_Mt65D2 | 0 | 0 | 0 | 0 | 0 | band not |
| | | | | | | | | visible |
| | | MEDsa.AFPm1 | 3 | 3 | 2.25 | 2.6 | 2 | N/A |
| | | Empty Vector | 0 | 0 | 0 | 0.5 | 0 | N/A |
| | | 20 mM Tris-HCl pH 8.0 | 0 | 0 | 0 | 0 | 0 | N/A |

[0086] This data demonstrates that linkers have a broad capacity for linking two defensin regions together to create synthetic 2D defensin that are active against one or more fungal pathogens. Eight of the seventeen linkers tested (Bn35L11, Bn47L2, Bn74L3, Bn75L13, CITcl2L17, CITcl3L14, MALdo11L12, and Mt65L8) showed promise in working across different defensin backgrounds. Many of the synthetic multi-domain or 2D defensins had higher levels of protein accumulation in plant protoplasts with the potential for new or altered spectrums of activity against different fungal pathogens.

### Example 10. Disease Reduction by Synthetic Heterodimeric 2D Defensins in Transgenic Soybean Plants

[0087] Transgenic soybean plants expressing heterodimeric 2D defensin Cl.AFP22/linker Mt.AFP65/AMAru.AFP10 (nucleotide SEQ ID NO: 1155 and polypeptide SEQ ID NO: 1156) were established and grown in soil in growth chambers and inoculated with a pathogen suspension containing Phakopsora pachyrhizi (pathogen for Asian soy rust, ASR), at the V2 stage. The plants were scored 12-14 days after inoculation for percent leaf infection. The score was compared to that of plants transformed with an empty vector. The transgenic soybean plants expressing the heterodimeric 2D defensin showed significant disease reduction as compared to the control plants.

TABLE 15
Transgenic soybean plants expressing heterodimeric 2D defensin.

| | | Numbers | | |
|---|---|---|---|---|
| | NUC SEQ ID NO/ | of Sample | Mean of percent leaf | Std |
| Sample ID | PRT SEQ ID NO | tested | infection * | Error |
| Empty Vector Control | / | 33 | 41.8182 | 1.7029 |
| Cl.AFP22/linker | 1155/1156 | 30 | 31.3333 | 1.7860 |
| Mt.AFP65/AMAru.AFP10 | | | | |

* Means are statistically different at p < 0.05

### Example 11. 1D Defensin Capable of Inhibiting Fungal Growth

[0088] Several native 1D defensins were also identified that may be useful either alone or as defensin regions/domains when designing synthetic 2D or other MD defensins. Table 16 provides a list of native 1D defensins with nucleotide and protein sequence identifiers and annotated to identify the boundaries between different sequence regions or domains. The ninety-nine (99) defensins listed in Table 16 were selected based on their activity in the fungal plate assay described above in Example 6. Of the 413 1D defensin proteins tested, the 99 1D defensins listed in Table 16 had an average fungal growth inhibition score of 2 or greater over at least two repeated experiments against at least one of the five fungi listed in the Tables above.

[0089] As similarly described above, the polynucleotide sequence positions defining the boundaries of the polynucleotide sequences encoding the N-terminal TS sequence (TS_Start, TS_End), the defensin sequence portion (Def_Start, Def_End), and the C-terminal extension sequence (CT_Start, Ct_End; if present) are identified for each of the 1D defensins listed. Based on the information provided in Table 16, one can discern the corresponding protein sequence boundaries of the N-terminal TS sequence, defensin sequence portion, and C-terminal extension sequence (if present) of a 1D defensin encoded by the polynucleotide sequences in Table 15 by dividing the nucleotide positions by three (an amino acid corresponding to one codon of three nucleotides). As an exemplary illustration, the 1D defensin protein “ARAly_AFP15” has an amino acid length of 83 amino acids with its TS sequence corresponding to amino acids 1-19, its defensin sequence portion corresponding to amino acids 20-75, and its C-terminal extension sequence corresponding to amino acids 76-83 of SEQ ID NO: 1054.

TABLE 16
Identification of 1D defensins.

| | | | Targeting Signal (TS) Sequence | | | | | | | |
|---|---|---|---|---|---|---|---|---|---|---|
| | DNA | PRT | DNA | PRT | | | | | | |
| | SEQ | SEQ | SEQ | SEQ | | | | | | |
| Locus_ID | ID NO | ID NO | ID NO | ID NO | TS_Start | TS_End | Def_Start | Def_End | CT_Start | CT_End |
| ARAly_AFP15 | 955 | 1054 | 713 | 859 | 1 | 57 | 58 | 225 | 226 | 249 |
| Zm_AFP82 | 956 | 1055 | 714 | 860 | 1 | 81 | 82 | 237 | 238 | 321 |
| IPOtr_AFP2 | 957 | 1056 | 715 | 861 | 1 | 96 | 97 | 237 | No CT | No CT |
| ABUth_AFP1 | 958 | 1057 | 716 | 862 | 1 | 81 | 82 | 222 | No CT | No CT |
| ABUth_AFP6 | 959 | 1058 | 717 | 863 | 1 | 24 | 25 | 180 | No CT | No CT |
| AMBar_AFP1 | 960 | 1059 | 718 | 864 | 1 | 93 | 94 | 234 | No CT | No CT |
| AMBar_AFP7 | 961 | 1060 | 719 | 865 | 1 | 117 | 118 | 249 | No CT | No CT |
| AMAru_AFP16 | 962 | 1061 | 720 | 866 | 1 | 90 | 91 | 240 | No CT | No CT |
| AMAru_AFP10 | 963 | 1062 | 721 | 867 | 1 | 81 | 82 | 240 | No CT | No CT |
| AMBtr_AFP6 | 964 | 1063 | 722 | 868 | 1 | 213 | 214 | 360 | No CT | No CT |
| AMBtr_AFP7 | 965 | 1064 | 723 | 869 | 1 | 93 | 94 | 234 | No CT | No CT |
| BRAdi_AFP13 | 966 | 1065 | 724 | 870 | 1 | 96 | 97 | 240 | No CT | No CT |
| Bn_AFP43 | 967 | 1066 | 725 | 871 | 1 | 78 | 79 | 240 | 241 | 255 |
| Bn_AFP1 | 968 | 1067 | 726 | 872 | 1 | 75 | 76 | 231 | 232 | 240 |
| Bn_AFP51 | 969 | 1068 | 727 | 873 | 1 | 90 | 91 | 267 | 268 | 282 |
| Bn_AFP98 | 970 | 1069 | 728 | 874 | 1 | 87 | 88 | 252 | 253 | 264 |
| Bn_AFP52 | 971 | 1070 | 729 | 875 | 1 | 231 | 232 | 402 | 403 | 417 |
| Bn_AFP103 | 972 | 1071 | 730 | 876 | 1 | 81 | 82 | 228 | 229 | 273 |
| Sb_AFP1 | 973 | 1072 | 731 | 877 | 1 | 78 | 79 | 231 | 232 | 384 |
| CANro_AFP2 | 974 | 1073 | 732 | 878 | 1 | 78 | 79 | 219 | No CT | No CT |
| CANro_AFP1 | 975 | 1074 | 733 | 879 | 1 | 93 | 94 | 234 | No CT | No CT |
| CANro_AFP13 | 976 | 1075 | 734 | 880 | 1 | 84 | 85 | 213 | 214 | 273 |
| CHEal_AFP7 | 977 | 1076 | 735 | 881 | 1 | 108 | 109 | 249 | No CT | No CT |
| CHEal_AFP1 | 978 | 1077 | 736 | 882 | 1 | 78 | 79 | 222 | No CT | No CT |
| CONca_AFP1 | 979 | 1078 | 737 | 883 | 1 | 96 | 97 | 237 | No CT | No CT |
| STEme_AFP1 | 980 | 1079 | 738 | 884 | 1 | 96 | 97 | 231 | No CT | No CT |
| ERAte_AFP11 | 981 | 1080 | 739 | 885 | 1 | 87 | 88 | 234 | No CT | No CT |
| Mt_AFP52 | 982 | 1081 | 740 | 886 | 1 | 9 | 10 | 171 | No CT | No CT |
| ERAte_AFP14 | 983 | 1082 | 741 | 887 | 1 | 90 | 91 | 276 | No CT | No CT |
| ERAte_AFP23 | 984 | 1083 | 742 | 888 | 1 | 90 | 91 | 255 | 256 | 303 |
| ERAte_AFP26 | 985 | 1084 | 743 | 889 | 1 | 87 | 88 | 258 | No CT | No CT |
| ERAte_AFP29 | 986 | 1085 | 744 | 890 | 1 | 87 | 88 | 249 | 250 | 291 |
| ERAte_AFP30 | 987 | 1086 | 745 | 891 | 1 | 66 | 67 | 207 | 208 | 303 |
| ERAte_AFP36 | 988 | 1087 | 746 | 892 | 1 | 72 | 73 | 216 | 217 | 324 |
| ERAte_AFP37 | 989 | 1088 | 747 | 893 | 1 | 99 | 100 | 258 | 259 | 303 |
| Cl_AFP22 | 990 | 1089 | 748 | 894 | 1 | 93 | 94 | 240 | No CT | No CT |
| Cl_AFP24 | 991 | 1090 | 749 | 895 | 1 | 69 | 70 | 210 | 211 | 312 |
| ERAte_AFP56 | 992 | 1091 | 750 | 896 | 1 | 69 | 70 | 213 | 214 | 333 |
| ERAte_AFP57 | 993 | 1092 | 751 | 897 | 1 | 87 | 88 | 249 | No CT | No CT |
| Cl_AFP39 | 994 | 1093 | 752 | 898 | 1 | 12 | 13 | 186 | 187 | 228 |
| ERAte_AFP58 | 995 | 1094 | 753 | 899 | 1 | 60 | 61 | 219 | 220 | 354 |
| Cl_AFP44 | 996 | 1095 | 754 | 900 | 1 | 96 | 97 | 240 | No CT | No CT |
| ERAte_AFP65 | 997 | 1096 | 755 | 901 | 1 | 81 | 82 | 249 | No CT | No CT |
| STEme_AFP2 | 998 | 1097 | 756 | 902 | 1 | 30 | 31 | 162 | No CT | No CT |
| STEme_AFP6 | 999 | 1098 | 757 | 903 | 1 | 138 | 139 | 282 | No CT | No CT |
| ERAte_AFP87 | 1000 | 1099 | 758 | 904 | 1 | 87 | 88 | 234 | No CT | No CT |
| ERAte_AFP92 | 1001 | 1100 | 759 | 905 | 1 | 144 | 145 | 351 | No CT | No CT |
| STEme_AFP4 | 1002 | 1101 | 760 | 906 | 1 | 96 | 97 | 246 | No CT | No CT |
| ERAte_AFP94 | 1003 | 1102 | 761 | 907 | 1 | 90 | 91 | 276 | No CT | No CT |
| ERAte_AFP95 | 1004 | 1103 | 762 | 908 | 1 | 81 | 82 | 246 | 247 | 312 |
| ARAly_AFP1 | 1005 | 1104 | 763 | 909 | 1 | 87 | 88 | 231 | 232 | 246 |
| At_AFP1 | 1006 | 1105 | 764 | 910 | 1 | 90 | 91 | 231 | No CT | No CT |
| Ps_AFP1 | 1007 | 1106 | — | — | — | — | 1 | 138 | No CT | No CT |
| PINsy_AFP1 | 1008 | 1107 | 765 | 911 | 1 | 99 | 100 | 246 | 247 | 252 |
| Ta_AFP1 | 1009 | 1108 | — | — | — | — | 1 | 141 | No CT | No CT |
| Ph_AFP2 | 1010 | 1109 | 766 | 912 | 1 | 75 | 76 | 222 | 223 | 306 |
| DIGsa_AFP1 | 1011 | 1110 | 767 | 913 | 1 | 192 | 193 | 348 | 349 | 399 |
| SACra_AFP18 | 1012 | 1111 | 768 | 914 | 1 | 75 | 76 | 195 | 196 | 282 |
| SACra_AFP20 | 1013 | 1112 | 769 | 915 | 1 | 15 | 16 | 171 | 172 | 207 |
| SACra_AFP23 | 1014 | 1113 | 770 | 916 | 1 | 81 | 82 | 228 | 229 | 324 |
| SACra_AFP27 | 1015 | 1114 | 771 | 917 | 1 | 78 | 79 | 231 | 232 | 330 |
| EUPma_AFP6 | 1016 | 1115 | 772 | 918 | 1 | 87 | 88 | 237 | No CT | No CT |
| EUPma_AFP7 | 1017 | 1116 | 773 | 919 | 1 | 87 | 88 | 237 | No CT | No CT |
| EUPma_AFP2 | 1018 | 1117 | 774 | 920 | 1 | 81 | 82 | 222 | No CT | No CT |
| FOEvu_AFP4 | 1019 | 1118 | 775 | 921 | 1 | 102 | 103 | 273 | No CT | No CT |
| BASsc_AFP18 | 1020 | 1119 | 776 | 922 | 1 | 54 | 55 | 207 | 208 | 261 |
| BASsc_AFP20 | 1021 | 1120 | 777 | 923 | 1 | 90 | 91 | 246 | No CT | No CT |
| BASsc_AFP3 | 1022 | 1121 | 778 | 924 | 1 | 81 | 82 | 225 | No CT | No CT |
| BASsc_AFP25 | 1023 | 1122 | 779 | 925 | 1 | 36 | 37 | 351 | No CT | No CT |
| BASsc_AFP11 | 1024 | 1123 | 780 | 926 | 1 | 24 | 25 | 174 | No CT | No CT |
| Os_AFP12 | 1025 | 1124 | 781 | 927 | 1 | 69 | 70 | 213 | 214 | 321 |
| Os_AFP9 | 1026 | 1125 | 782 | 928 | 1 | 72 | 73 | 213 | 214 | 258 |
| Mt_AFP36 | 1027 | 1126 | 783 | 929 | 1 | 87 | 88 | 213 | 214 | 222 |
| Ta_AFP4 | 1028 | 1127 | — | — | — | — | 1 | 375 | No CT | No CT |
| Mt_Def4 | 1029 | 1128 | 784 | 930 | 1 | 87 | 88 | 228 | No CT | No CT |
| PANha_AFP7 | 1030 | 1129 | 785 | 931 | 1 | 96 | 97 | 237 | No CT | No CT |
| PANvi_AFP55 | 1031 | 1130 | 786 | 932 | 1 | 75 | 76 | 303 | No CT | No CT |
| PANvi_AFP17 | 1032 | 1131 | 787 | 933 | 1 | 69 | 70 | 216 | 217 | 369 |
| PLAma_AFP7 | 1033 | 1132 | 788 | 934 | 1 | 15 | 16 | 156 | 157 | 330 |
| PORol_AFP12 | 1034 | 1133 | 789 | 935 | 1 | 81 | 82 | 225 | No CT | No CT |
| PORol_AFP15 | 1035 | 1134 | 790 | 936 | 1 | 87 | 88 | 231 | No CT | No CT |
| PORol_AFP4 | 1036 | 1135 | 791 | 937 | 1 | 90 | 91 | 231 | No CT | No CT |
| PORol_AFP6 | 1037 | 1136 | 792 | 938 | 1 | 24 | 25 | 165 | No CT | No CT |
| RAPra_AFP6 | 1038 | 1137 | 793 | 939 | 1 | 81 | 82 | 219 | No CT | No CT |
| RAPra_AFP8 | 1039 | 1138 | 794 | 940 | 1 | 87 | 88 | 240 | No CT | No CT |
| RAPra_AFP9 | 1040 | 1139 | 795 | 941 | 1 | 87 | 88 | 240 | No CT | No CT |
| RAPra_AFP11 | 1041 | 1140 | 796 | 942 | 1 | 87 | 88 | 237 | No CT | No CT |
| RAPra_AFP20 | 1042 | 1141 | 797 | 943 | 1 | 87 | 88 | 237 | No CT | No CT |
| RAPra_AFP12 | 1043 | 1142 | 798 | 944 | 1 | 87 | 88 | 240 | No CT | No CT |
| ROSbl_AFP13 | 1044 | 1143 | 799 | 945 | 1 | 30 | 31 | 198 | No CT | No CT |
| ROSbl_AFP7 | 1045 | 1144 | 800 | 946 | 1 | 81 | 82 | 225 | No CT | No CT |
| ROSbl_AFP8 | 1046 | 1145 | 801 | 947 | 1 | 81 | 82 | 222 | No CT | No CT |
| Sb_AFP6 | 1047 | 1146 | 802 | 948 | 1 | 96 | 97 | 237 | No CT | No CT |
| SPIol_AFP13 | 1048 | 1147 | 803 | 949 | 1 | 93 | 94 | 249 | No CT | No CT |
| SPIol_AFP15 | 1049 | 1148 | 804 | 950 | 1 | 84 | 85 | 231 | No CT | No CT |
| TARof_AFP4 | 1050 | 1149 | 805 | 951 | 1 | 84 | 85 | 231 | 232 | 414 |
| TARof_AFP6 | 1051 | 1150 | 806 | 952 | 1 | 39 | 40 | 189 | 190 | 345 |
| Zm_AFP73 | 1052 | 1151 | 807 | 953 | 1 | 90 | 91 | 246 | 247 | 314 |
| Zm_AFP10 | 1053 | 1152 | 808 | 954 | 1 | 99 | 100 | 246 | 247 | 318 |

### Example 12. Transgenic Soybean Plants Expressing 1D Defensin have Enhanced Disease Resistance to Phakopsora Pachyrhizi

[0090] Transgenic soybean plants expressing 1D defensins listed in Table 17 were established and grown in soil in growth chambers and inoculated at the V2 stage with a pathogen suspension containing soybean rust pathogen, Phakopsora pachyrhizi. The plants were scored 12-14 days after inoculation for percent leaf infection. Disease reduction is reported as percent disease relative to the negative control (plants transformed with an empty vector) in Table 17. These results show that the transgenic soybean plants expressing 1D defensin, Cl.AFP44, ERAte_AFP29, or ERAte_AFP30 have enhanced resistance to Phakopsora pachyrhizi.

TABLE 17
Disease testing for trangenic soybean plants expressing 1D defensins

| | | | % disease | |
|---|---|---|---|---|
| | | | relative to | Statistically |
| | NUC SEQ ID NO/ | | negative | Significant |
| Tests | PRT SEQ ID NO | Locus ID | control | Activity? |
| 1 | 991/1090 | C1.AFP44 | 31 | yes |
| 2 | 991/1090 | C1.AFP44 | 38 | yes |
| 3 | 986/1085 | ERAte_AFP29 | 71 | yes |
| 4 | 987/1086 | ERAte_AFP30 | 65 | yes |

### Example 13. Transgenic Soybean Plants Expressing PINSY.AFP1 have Enhanced Disease Resistance to Phakopsora Pachyrhizi

[0091] Transgenic soybean plants expressing a codon optimized PINSY.AFP1 gene (SEQ ID NO: 1157) under the control of a synthetic promoter as set forth in SEQ ID NO: 1158 were generated. Field trials of transgenic plants expressing PINSY.AFP1 (polypeptide SEQ ID NO: 1107) were conducted to assess plant resistance to Phakopsora pachyrhizi utilizing multiple planting dates. The field trials were conducted using a randomized complete block design for each of two planting dates. Efficacy parameters were scored throughout the field trial season and at the end of the season yield was determined. Trait efficacy was measured by scoring disease prevalence 3 times at 14 day intervals once ASR was observed in the wildtype plots. Disease Ratings were taken as a 1-9 rating of overall plot infection (RST) and as a percent disease infection in the plots (DPPF). Efficacy data was utilized to calculate area under the disease progress curve (AUDPC) to determine overall disease resistance of each event. Data are presented in Table 18.

TABLE 18
Field Trial Efficacy Results as Rated disease infection (RST)
and Percent disease infection reduction (DPPF)

| | Area under disease | Area under disease | RST | DPPF |
|---|---|---|---|---|
| Event | progress curve RST | progress curve DPPF | LSD(.10) | LSD(.10) |
| Non-transgenic control | 31.9 | 319.4 | 7.4 total | 99.7 total |
| Transgenic Event 1 | 26.3 | 117.7** | 7.4 total | 99.7 total |
| Transgenic Event 2 | 21.0** | 95.4** | 7.4 total | 99.7 total |
| Transgenic Event 3 | 26.3 | 207.8* | 7.4 total | 99.7 total |
| Transgenic Event 4 | 22.8** | 163.6** | 7.4 total | 99.7 total |

*Significant reduction in disease at p ≤ 0.1
**Significant reduction in disease at p ≤ 0.05

[0092] The average rated disease for the control plants was 31.9. The average rated crop injury by disease for transgenic PINSy.AFLP1 soybean Event 1, Event 2, Event 3, and Event 4 was 26.3, 21.0, 26.3, and 22.8 respectively. The rated disease reduction least significant difference (LSD) at 0.10 was 7.4 for all events tested. The average percent disease for the non-transgenic control utilizing Area Under the Disease Progress Curve (AUDPC) 319.4. The average AUDPC for percent crop injury by disease for transgenic PINSy.AFP1 soybean Event 1, Event 2, Event 3, and Event 4 was 117.7, 95.4, 207.8 and 163.6 respectively. The AUDPC percent disease reduction least significant difference (LSD) at 0.10 was 99.7 for all transgenic events tested. These results indicate that all transgenic soybean events expressing PINSY.AFP1 have enhanced disease resistance to Phakopsora pachyrhizi.

### Example 14. Transgenic Corn Plants Expressing 1D Defensins have Enhanced Disease Resistance

[0093] Transgenic corn plants expressing 1D defensin were generated and grown in the greenhouse. At the VT growth stage, two nodes were infected by wounding the stalk and injecting a suspension of Colletotrichum graminicola inoculum into the wound. Corn plants were evaluated ˜2-3 weeks after inoculation. Stalks were harvested, leaves were removed and the stalks were split longitudinally. Disease severity was reported as the percent necrosis of the cut surface and is compared to the percent necrosis of non-transformed plants as shown in Table 19. Transgenic corn plants expressing defensin AMBtr_AFP7, Cl_AFP22, Cl_AFP44, ERAte_AFP95, Ph_AFP2, or PINsy_AFP1 as shown in Table 19 have enhanced disease resistance to Colletotrichum graminicola. Transgenic corn plants expressing defensin Ph_AFP2 were further tested for resistance to other pathogens and were shown to have enhanced broad-spectrum disease resistance to S. maydis F. verticiliodes, F. graminearum.

TABLE 19
Transgenic corn plants expressing 1D defensins have enhanced disease resistance

| | | | Number of events with significant |
|---|---|---|---|
| | | | disease reduction/number of |
| Defensin | NUC SEQ ID NO | PRT SEQ ID NO | events tested (at p-value < 0.2) |
| AMBtr_AFP7 | 961 | 1060 | 5 of 7 |
| Cl_AFP22 | 990 | 1089 | 3 of 7 |
| Cl_AFP44 | 996 | 1095 | 3 of 20 |
| ERAte_AFP95 | 1004 | 1103 | 6 of 9 |
| Ph_AFP2 | 1010 | 1109 | 9 of 17 |
| PINsy_AFP1 | 1108 | 1107 | 4 of 9 |

[0094] As various modifications could be made in the constructions and methods herein described and illustrated without departing from the scope of the invention, it is intended that all matter contained in the foregoing description or shown in the accompanying drawings shall be interpreted as illustrative rather than limiting. The breadth and scope of the invention should not be limited by any of the above-described exemplary embodiments, but should be defined only in accordance with the following claims appended hereto and their equivalents. All patent and non-patent documents cited in this specification are incorporated herein by reference in their entireties.

What is claimed is:

1. A recombinant DNA construct comprising a nucleic acid sequence encoding a multi-domain defensin polypeptide comprising a first defensin region connected to a second defensin region by a linker region, the first defensin region and the second defensin region each comprising a gamma-thionin domain, wherein the nucleic acid sequence encoding the multi-domain defensin polypeptide is operably linked to a promoter functional in a plant cell.

2. The recombinant DNA construct of claim 1, wherein the first defensin region is heterologous with respect to the second defensin region or the linker region.

3. The recombinant DNA construct of claim 1, wherein the first defensin region is identical to the second defensin region.

4. The recombinant DNA construct of claim 1, wherein the first defensin region is different from the second defensin region.

5. The recombinant DNA construct of claim 1, wherein the first defensin region or the second defensin region comprises a polypeptide having at least 80% identity to an amino acid sequence selected from the group consisting of SEQ ID NOs: 559-662.

6. The recombinant DNA construct of claim 5, wherein the first defensin region or the second defensin region comprises a polypeptide having an amino acid sequence selected from the group consisting of SEQ ID NOs: 559-662.

7. The recombinant DNA construct of claim 1, wherein the linker region comprises a polypeptide having at least 80% identity to an amino acid sequence selected from the group consisting of SEQ ID NOs: 153-202.

8. The recombinant DNA construct of claim 7, wherein the linker region comprises a polypeptide having an amino acid sequence selected from the group consisting of: SEQ ID NOs: 153-202.

9. The recombinant DNA construct of claim 1, wherein the multi-domain defensin polypeptide comprises an amino acid sequence having at least 80% identity to an amino acid sequence selected from the group consisting of SEQ ID NOs: 52-102, 329-454 and 1156.

10. The recombinant DNA construct of claim 9, wherein the multi-domain defensin polypeptide comprises an amino acid sequence selected from the group consisting of SEQ ID NOs: 52-102, 329-454 and 1156.

11. The recombinant DNA construct of claim 1, wherein the first defensin region or the second defensin region comprises an amino acid sequence having at least 80% identity to a sequence selected from the group consisting of SEQ ID NOs: 1054-1152 and 1154.

12. The recombinant DNA construct of claim 11, wherein the first defensin region or the second defensin region comprises a sequence selected from the group consisting of SEQ ID NOs: 1054-1152 and 1154.

13. The recombinant DNA construct of claim 1, wherein the multi-domain defensin polypeptide encoded by nucleic acid sequence further comprises an N-terminal transit signal sequence having at least 80% identity to an amino acid sequence selected form the group consisting of SEQ ID NOs: 809-954.

14. A plant, seed, plant tissue, plant part, or cell comprising the recombinant DNA construct of claim 1.

15. The plant, seed, plant tissue, plant part, or cell of claim 14, comprising the multi-domain defensin polypeptide encoded by the recombinant DNA construct of claim 1.

16. The plant, seed, plant tissue, plant part, or cell of claim 15, wherein the plant, seed, plant tissue, plant part, or cell has tolerance or activity against at least one plant fungal pathogen selected from the group consisting of Fusarium, Collectotrichum, Stenocarpella, and Phakopsora.

17. The plant, seed, plant tissue, plant part, or cell of claim 16, wherein the plant, seed, plant tissue, plant part, or cell has tolerance or activity against at least one fungal species selected from the group consisting of Fusarium graminearum, Fusarium verticilloides, Collectotrichum graminicola, Stenocarpella maydis, and Phakopsora pachyrhizi.

18. A microorganism comprising the recombinant DNA construct of claim 1.

19. A DNA molecule or vector comprising the recombinant DNA construct of claim 1.

20. The DNA molecule or vector of claim 19, wherein the nucleic acid sequence comprises a polynucleotide sequence having at least 70% identity to a nucleotide sequence selected from the group consisting of SEQ ID NOs: 1-51, 203-328 and 1155.

21. The DNA molecule or vector of claim 19, wherein the nucleic acid sequence comprises a polynucleotide having a sequence selected from the group consisting of SEQ ID NOs: 1-51, 203-328 and 1155.

22. A method for conferring fungal pathogen tolerance or resistance to a plant, seed, cell, or plant part comprising expressing in said plant, seed, cell, or plant part the multi-domain defensin polypeptide encoded by the recombinant DNA construct of claim 1.

23. A method for producing a transgenic plant with tolerance to a fungal pathogen comprising transforming a plant cell or tissue with the recombinant DNA molecule or vector of claim 18, and regenerating a transgenic plant.

24. A recombinant DNA construct comprising a nucleic acid sequence encoding a defensin polypeptide having at least 80% identity to an amino acid sequence selected from the group consisting of SEQ ID NOs: 1054-1152, wherein the nucleic acid sequence encoding the defensin polypeptide is operably linked to a promoter functional in a plant cell.

25. The recombinant DNA construct of claim 24, wherein the defensin polypeptide has an amino acid sequence selected from the group consisting of SEQ ID NOs: 1054-1152.

26. The recombinant DNA construct of claim 24, wherein the promoter comprises a nucleotide sequence as set for in SEQ ID NO: 1158.

27. A plant, seed, plant tissue, plant part, or cell comprising the recombinant DNA construct of claim 24.

28. The plant, seed, plant tissue, plant part, or cell of claim 27, wherein the plant, seed, plant tissue, plant part, or cell has tolerance or activity against at least one plant fungal pathogen selected from the group consisting of Fusarium, Collectotrichum, Stenocarpella, and Phakopsora.

29. The plant, seed, plant tissue, plant part, or cell of claim 28, wherein the plant, seed, plant tissue, plant part, or cell has tolerance or activity against at least one fungal species selected from the group consisting of Fusarium graminearum, Fusarium verticilloides, Collectotrichum graminicola, Stenocarpella maydis, and Phakopsora pachyrhizi.

30. A method for producing a transgenic plant with tolerance to a fungal pathogen comprising transforming a plant cell or tissue with the recombinant DNA molecule or vector of claim 24, and regenerating a transgenic plant.

The application's sequence listing, which the Patent Office published only in electronic form, follows.

SEQUENCE LISTING (1158 sequences)

SEQ ID NO: 1 - DNA, 375 bp, Arabidopsis lyrata
atggagaggacaagtacttcacttctattccttgttagcttagttatcatatttgccacagttgtgaatcagataagagcacaaacatgtgacgacaaactaggctcttgtgaaaattgcgaccaaaggtgcaaggccaaacacggaccatcgtccgtaagcaaatgtaacggtccggatgggatgtgcaagtgcacctacgaatgtgcgtcatttaaaccagccaaagtgtgcgtcggtgcgactgatatgtgcactgacacttgtcctcagagttgttgtgatagacaatgcgcaataaaatataagaatggacatgggggttgtgtcaactatgctggttataggatgtgcatatgcgagtactcttgctaa

SEQ ID NO: 2 - DNA, 390 bp, Arabidopsis thaliana
atggctatcacaaaaaaaaaattagtcgtgtatactttcactcttctctttatcatatcttatgttcattgccagtctacatccgctagcagtcctggttttgacaacggagaagtttgcaaacaattcaaattcaatccgtgtgaacgcggaggggatagaggctgcactgtgttttgtacaagaaagttgtttactcgaggcgaatgcagagacgagggatgttggtgttgtcctagttttgacatcggggaaagttgccaaggtttcaaattcaatccgtgtgaacgcggaggggatagaggctgcactgtgttttgtaaaagaaaattggttactcgaggcgaatgcagagacgagggatgttggtgttgtcctggacaagtatga

SEQ ID NO: 3 - DNA, 384 bp, Arabidopsis thaliana
atggagaggataacttcacttgtattctttgctagcttccttattatatttgtctcaggtgttaatcagacaagagcagattcatgcgatgaaagtctaggcctttgcgaaacatgtgacgaaagatgccaggccaaacacgggccatcgtgcataagcaaatgtgacggagaggttgggatgttgtcgtgcacgtgcacttacgagtgtggaccacctttaccccccaaaggtaacgtttgcagcggtgggactggtatgtgcagtggaaagtgtccatataaatgttgtgataccagttgcgcacaaaagtataatggtggacgtggattttgtaactcctttggtaattataatttttgccaatgcgaatacccttgctaa

SEQ ID NO: 4 - DNA, 363 bp, Arabidopsis thaliana
atggagaggacaagtacttcacttctattcctgcttagcttacttatcatatttgcctcagctgtgaatcagataagagcacagacatgtgacgagaacctaagctcttgtgaaaattgcgaccaaaggtgcaaggccaaacacggaccatcgtccgtaagcaaatgtaacggtccggatgggacgtgcggatgtgcctcatttaaaccagccaaactgtgcatcggtgcgactgatatgtgcactgataaatgtcctacaagttgttgtgatagacaatgcgctataaaatataagaatggaaaagggggttgtgtcgactatgctggttataggatgtgcatttgcgagtacacttgctaa

SEQ ID NO: 5 - DNA, 381 bp, Arabidopsis thaliana
atggagaaggcactttcacttgtggttttcatcatcttctctatcatgcttgcttccgttgagaataaggtaaacgcaaatacatgcatcgagggtattggtaattgtcagcaatgtgacgtgagatgcaaggccagacacggaccagcggccaaaggcgcttgtgactccaaatttcaactatgcacgtgcaattacccttgcggacagggtccatcgcctccgcagcccaaaaaatgttatggtggagctggcatttgcagcgatagatgtggggctcagtgttgcaaccaaaactgtgcgcaaaagtataatcaaggaagtggattttgtgacagcattggcaatacttctttgtgtaaatgccaatataattgctaa

SEQ ID NO: 6 - DNA, 369 bp, Arabidopsis thaliana
atggagaggataccttcacttgcatcccttgttagcttgcttatcatatttgccacagttgttaatcagacaagagcaagtatctgtaacgacagactaggcctttgcgatggttgcgatcaaagatgtaaggccaaacacgggccatcgtgcgaaagtaaatgtgacgggccggttggaatgttgctgtgcacgtgcacttacgagtgtggtccaacaaagctttgcaatggtgggcttggcaattgcggtgaaagttgtaatgaacaatgttgtgataggaattgtgcacaaagatacaatggtggacatggatattgtaacacccttgatgattttagtttgtgcttatgcaagtacccttgctaa

SEQ ID NO: 7 - DNA, 357 bp, Bassia scoparia
atgatgaacatagcgagaggagaggattggtgcgaaaaaggactaggaatatgtggaccgggaacggattgtgaggacaagtgtaagcaattggatccgagttacgtagggatttgtaatcgcgaaatcaggcctccggtgtgtagctgccactacccctgtccttctcccccttctcctcccggtccgccgaaaaaatgcaccgataatggcggggtatgcagtgaaaaatgcgacgacgggtgttgtttggctaattgtaagaacaagttccctagtaaagatgaggtctctgggtcatgtcaagacggtgtagggacttccattagattgtgtttatgtgagtatgattgttag

SEQ ID NO: 8 - DNA, 405 bp, Brassica napus
atggagaggataactccagttgtattactcgttagcttgcttatcatgtttgcatcaggcattgttatgtctctcaattttgtgaatcagaccagagcaaaatgtgccgacggactaggcacttgtgaaaactgcgacgagagatgcaaggccaaacacgggccatcaagtgaaagcatctgtgaccgctctcttgggatgcctctgtgcatgtgctactatcaatgtgcaaccccaccgactccgactccacccaagatttgcaatggtggagctggtttatgtagtgcaaggtgtctcggaagttgttgtgatactaactgcgcacaaaagtttaacggtggacatggattttgtagcaccctcggtacttttagtttgtgccaatgtcagtatccttgttaa

SEQ ID NO: 9 - DNA, 333 bp, Brassica napus
atgattgaggcacaagggaatttgtgcagagatggtctaggcacttgtgaagactgcgaccagaaatgtaaaactaagcacggaccatcaagcgaaagcagctgcgaccgtagtgttggagtggcactatgcacgtgcttttaccaatgtactcctcctacacctccgtcgcccccgacacggcccacttgcaacagtggaactactctatgcactgaacagtgctcggacagttgctgtgacacgaactgcgcacaatcgcatgacggtggacatggaatttgtaattccattggtaacactcgtctttgtttgtgtgagtacccttgctag

SEQ ID NO: 10 - DNA, 369 bp, Brassica napus
atgaagaatacattttcacttgtggttgtaatcatcttctttgtcatgctttcttccgttgctaataaggtgaaggcaaactcatgccaagaccctctaggtagttgtctacaatgtgatgagagatgcaaggctaagcacgggccaacgggccaagcaagttgcgacagtcgaaaccaactatgcacgtgctattacacgtgcggaccgccatcaccaactcctccacatcacaaacaatgctacggtgggactggcttgtgcagcagtgcatgcaatcaaaactgtgcacaaaagtatcttggtggatctggattttgtgagagcattggcatctctagactgtgcaaatgccagtatccttgctaa

SEQ ID NO: 11 - DNA, 384 bp, Brassica napus
atggagagaataactccacttgtattacttgttagcctacttatcatttctgcctcagttgtgaatcggactagagcagatatgtgcgtcgatgtactagacacttgcgaatactgcgaccagagatgcaagtccaaacacgggccatcaggccaaggagactgtgaaagctctactggaatgcctatgtgtaggtgccactaccaatgtgaaccaccctcgctgactccactcaatacttgcaatggtggggccggtttatgtagtgtaaggtgtccccaaaaatgttgcgatattaactgtgcacttaagtttataggtggaagtgggatgtgtttcaccgtcggtaatactagtgtttgccagtgcaagtatccttgttaa

SEQ ID NO: 12 - DNA, 360 bp, Brassica napus
tttaatgatgtgtacaatgttacagttgtgaatcagactagagcaaatatatgcgtcgatggactaggcacttgcgaaatctgcgaccagagatgcaagtccaaacacgggccatcaggccacggagactgtgatgaccgctctactggggtgcctatgtgcaggtgccactaccaatgtgaaccaccctcgctgacgtcgactccactcaatacttgcaatggtggggccggtttatgtagtgtaaattgtccccaaaaatgttgcgatattaactgtgcacttaagtttataggtggaagtgggatgtgtttaaccctcggtaatactagcgtttgccagtgcaagtatccttgttaa

SEQ ID NO: 13 - DNA, 384 bp, Brassica napus
atggagagaataactcaacttatattacttgttagcctacttatcatttctgcctcagttgtgaatcagactagagcagatatgtgcgtcgatggactatacacttgcgactactgcgagcagagatgcaagtccaaacacgggccatcaggccaaggagaatgtgaaacccatactgggatgcctatgtgcatgtgccactaccaatgtgaaccaccctcgctgactccactcaatacttgcaatggtggggccggtttatgtagtgtaaggtgtccccaaaaatgttgcgatgtaaactgtgcacttaagtttacaggtggaagtgggatgtgtttcaccctcggtaatactagtgtttgccagtgcaagtatccttgttaa

SEQ ID NO: 14 - DNA, 369 bp, Brassica napus
atggagaggggatcttcacgtgtatttttattcatcttcttcatcatgcttgcttctgatgccaataaggtgatggcaaaaccttgcaacaacaatttaggtgattgtcaacaatgtgatgagaggtgcaaagctaagcacggaccaacgtgtcaaggtagttgtgacaacacttttaaacaatgcatctgtaacaacgagagtgcatcaccagcgtccaaaatatgctatagcggagctggcctgtgcaccacaaaatgttgggacgaatgttgcaacaaaacttgtgctagcatgtatttgaacggagttggatattgcgacagcattggccatattaatctatgcaaatgtcagtatccttgctaa

SEQ ID NO: 15 - DNA, 369 bp, Brassica napus
atggagagggaatcttcacgtgtatttttattcaccttcttcatcatgcttgcttctgatgccaataagatgatggcaaaaccttgcaacaacaatttaggtgattgtcaacagtgtgatgagaggtgcaaaactaagtatggaccaacgtgtcaaggtagttgtgacaacacttgtaaacaatgcctctgtaacaacgagagtgcatcaccagcgtccaaaatatgctatagcggagctggcctgtgcaccccaaaatgttgggacgaatgttgcaacaaaacttgtgctagcatgtatttgaatggagttggatattgcgacagcattggccatattaatctatgcaagtgtcagtatccttgctaa

SEQ ID NO: 16 - DNA, 336 bp, Brasicca Rapa
atggcatcaaagatcacattcttctttctccttgctctcgttatctcttgtgcaacgatggtgagcattccgacagtggaagctcaggtttttcttccttgcaaaacagctaaagattgtgaataccttcattgctcgagtgggacaggtcagtgcgtaaagagtcagtgtcaatgtagcggctcgctgactcgtaaagctaaaatcgacagctttaaaacgacgagttatgctcagacgtgcaaggtgacgagtgattgtgaccctagtatgaaaccttcatgtgtttcgggatcttatatgtgtttcaatggcttctgtacgtgtactcattaa

SEQ ID NO: 17 - DNA, 363 bp, Brasicca Rapa
atgcagaggacaacttctcttgtattccttgttaactttcttatcatatttacctcagttgtaaatcagagtagagcaggaacatgcgttgagactgaaggcccttgtgagaactgtgaccagaaatgcctggccaaattcggaccatcagttaacacccaatgtgggaattcgcagtgcttatgcatctacgagtgcccaccttcaccgcctaaagtatgcaacggtggggctggtctctgttctcagaattgtcctgaaaaatgctgtgatacgaattgtgcaacaaagtttaatggtggacatggatcttgtgtcacgcttggtaattttagtttgtgccaatgtgagtacccttgttag

SEQ ID NO: 18 - DNA, 405 bp, Carica papaya
atggagagttatagtttcaagtcaacatcactgtttgtaattttagtactatgtctactgcataatgtcaaggcccgaacaagccaatcagaagaatcattttcgacagagacacgctgcaaacgagatattgaatgtatgtcgtgtccacatggtggattctgtgacatgaagaccggaaaatgttcttgcttgccattgtcaacacaggcgcagtgtgagagagatgttgattgtatgggagcgtgtccacatggtggattctgtgatatgaagaatggaaaatgttcttgtttgccattatcgacacaggcacgctgtaaaagagatgttgattgtatgggagcatgtccacatggtggattttgtgacatgaaaaatggaagatgttcttgcttaccatga

SEQ ID NO: 19 - DNA, 423 bp, Carica papaya
atggctaagctgcttaatccagcatttcaatccttcctcctggcgtttgtattcttaggttttaatatatgtataactgtagcaggaagtttgaagaatatttccggcgatgcggatatatgttccgagccgttaggatattgcggcaacgactgcgagtcaaggtgtctggctagacacattggcgtcgagactcaaggatcatgcgattatacactgaaggtgccactatgcacctgctactacagctgtaatttgcagccaccgccacctgagacctgcaatgatggccttggctattgtactgtggcctgcgaagaggattgttgcaatagaaaatgtagcgaaaagcattatcagggacgaggtttatgcaacgagattggtacaattaaactctgtcaatgccagtatccatgttaa

SEQ ID NO: 20 - DNA, 387 bp, Carica papaya
atggccaagtactccttcatcgccattattctactgctcgcattcgaaagaggattgttggtggatggtgaaatctgttcggatgatttgggatactgcgataatatttgcgattcaaactgcaaatcgattcatccgaaaggcaatggaacttgtgtagaggatgaggcttcggtgatggtgtgtaggtgttcgtatttctgcttatctcctcctccacgtcgtcgatgtaatgtaggaatcgatagatgtactgcagcttgtaatgagaagtgctgcgacgaaaactgcatgtctaaatttccagaacatctgaactgccatggatcctgctccgatcttttaccgccacaatttagtgtttgcatttgtgcttatgactgttag

SEQ ID NO: 21 - DNA, 396 bp, Citrus clementina
atgtacgatagcaaggactcctttgcattaatctttctacttctcatagcgggcaccgcattgctgccggcagctaaagggaaaatatgcattgaagattttgggacgccttgtagtgaaggtagttgcgagagaacatgcgaatcaaaacatgcaaatggattaggggattgtgatgttgatgagagctgcaaatgcttctacgactgtgaagccaatccctctagaaaattatgcaaggaagatctgggtttgtaccctcgtggctgcactgctcaacaatgtcaaaatgattgtgcaaataaattccctggatctaaagacaatgtccatggatactgctacggccctgacatttatcctgatcaatcctgtcgttgcgcctatttttgttaa

SEQ ID NO: 22 - DNA, 405 bp, Citrus clementina
gtctcccctgctttattctttcttgttctcatagcaggaaccacattgctgccagtaactaaagggaaaatatgtattgaagattttgggccaaattgcagtggaggtgattgcgagacgaagtgcgaatcaaagcacaaaaatggattgggggactgtgacgttggtgagagctgtaaatgctactatgattgtgaagccaaaccaccaagaaaattatgcaagtctgatctgggtttgtaccctcgtggctgcgctgctcaacaatgtcaaaaagattgtgaaaatgaattccatggatattctaaagaagatgtccatggatattgctacggccatgacatttatccagatcaatcttgtcgttgcgcctatttttgtccttcttttaagcacaatggttaa

SEQ ID NO: 23 - DNA, 411 bp, Citrus clementina
atgaagaaggtatcctcatctccttccaatgcttcgctcctcttcctcttctcactcttagcagtaaccatgttggtcgaagtaaaagggcaaatatgtagtgaaaattatggctcatgtgatggccgtacgactcctgattgcaataaattttgcgcatcaaaccgtccccgtggcaatggatcttgtgatgccactgattattgcagatgcttttatccttgtgctggtcgtggtgataaaaaactctgcaaatattatgtcggtccaaaccctcagggcgggtgcagtgacgaagattgtgactcaacatgtagccaaaaattccccggatctgatcaagatggccatggattatgccaggccgttgagtatcctaatcttgcttgttattgcatccatttgtgttaa

SEQ ID NO: 24 - DNA, 393 bp, Citrus clementina
atggaaattggagataaattgttactaattcaattaatcaatttacgtggaaatgtagtgcataccatcaagggagatacgtgccaagaaggcttgggtcaatgtggcgctagcaatgactgtgatttacaatgtaaaactaggcacgctggtcaaggccaaggctcttgcgaccgcaccattcagcctccattgtgcacatgcttttacccttgtggctctccgtcgaaacggccgccatcgcccaaaaagtgcaccgccggtttaggtgcatgtgatcagtgccgcgacctatgttgcaacggcaagtgtgcggctcagtttaaaggtggtcaaggattttgtgataatattggtgcccaatatttgtgtcaatgtacatatgattgctaa

SEQ ID NO: 25 - DNA, 414 bp, Citrus sinensis
atgaagaaggtatcctcatctccttccaatgcttcgctcctcttcctcttctcactcttagcaggagtaaccatgttggtcgaagtaaaagggcaaatatgttgtgaaaattatggctcatgtgatggccgtacgactcctgattgcaatacattttgcgcatcaaaccgtccccgtggcaatggatcttgtgatgccactgattattgcagatgcttttatccttgtgctggtcgtggtgataaaaaactctgcaaatattatgtcggtccaaaccctcagggcgggtgcagtgacgaagattgtgactcaacatgtagccaaaaattccccggatatgatcaagatggccatggattatgccaggccgttgagtatcctaatcttgcttgttattgcatccatttgtgttaa

SEQ ID NO: 26 - DNA, 372 bp, Citrus sinensis
ttactaattcaattaatcaatttacgtggaaatgtagtgcataccatcaagggagatacgtgccaagaaggcttgggtcaatgtggcgccagcaatgattgtgatttacattgtaaaactaggcacgctggtcaaggccaaggctcttgcgaccgcaccattcagcctccattgtgcacatgcttttacccttgtggctctccgtcgaaacggccgtcatcgcccaaaaagtgcaccgccggtttaggtgcatgtgatcagtgccgcgacctatgttgcaacggcaagtgtgcggctcagtttaaaggtggtcaaggattttgtgataatattggtgcccaatatttgtgtcaatgtacatatgattgctaa

SEQ ID NO: 27 - DNA, 348 bp, Cucumis melo
atgactccagtggttggaaacaagaacatatgcagcgaagggttaggaccatgtggaaccaactgcgatgcaaggtgcaaagccaagcatagccctatagagaaccctcagggcagctgtgatcaaatcgggagcaacttatcgttgtgttactgcctttacacttgtggcattccgacgccgaagccgaacccaccacaaaactgcatctccggactagggttgtgcactggacaatgcaagagcgattgttgtaatgctaaatgtaggaggcagtaccaaggaggggaggggtattgtgacacaaacgttggagttcctttgtgccaatgcagccacccttgctaa

SEQ ID NO: 28 - DNA, 348 bp, Cucumis sativus
atgactccagtggtgggaaataaggacatatgcaccgaagggttaggaccatgtggaaccaactgcgatgcaaggtgcaaagctcagcatagccctaacgagaaccctcagggtagctgtgatcaaatcggtagcagcatatcgttgtgtaattgcctttacagttgtgacaggtcgacgccgatgccgaagccaccactaaactgcatctccggactagggttgtgcactgcacaatgcaagagcgattgttgtaatgctaaatgtgggcagcagtacaaaggaggagaggggttttgtgacacaaacgttggagtttctttgtgccaatgcagccatccttgctaa

SEQ ID NO: 29 - DNA, 414 bp, Glycine max
atggtgaaccgcatctcaaactatgttcctctcttcatcattttgattgttttggtaacagggcaaaaacaagtggaaggatataaatgtttgacagatatgggtttatgtgatgaacgtatcacctcgagtgagtgtgatcttagatgtaaatcccattataatgatggagaggggcactgtgataacatgaacatctgtaattgtattcaccattgtgtctctcctcagccaaataaagacaccgagcctataaggaagtgcacaagtggccttggactttgcagtattgatcactgctatgatgattgttgcaattcaaaatgtgctaaacaattcaaagagggtataggacattgtgaaattgtgggttcgatgggtaccatcttatgtacctgtgattatgtctgctga

SEQ ID NO: 30 - DNA, 390 bp, Glycine max
atggtgacttatatctcaaactattctcttctctttgtaatgttggctctgactataacaggcctaatagaagtaaaaggaaacacatgttcacaaccattgggtggatgtggtcctatgggacaatgtgaccagagatgtaaagctctacacattgatggacaaggatcttgtgacttaggcttgtgcacttgctactacggttgtgcagggcctccaccaagtccaaccccacctaaaatatgcaataatggtcttggggtttgcactcttcagtgtggtgatgcatgctgtaatgcaaattgtgcaagaaaatataatcagggaacagggatgtgtagcaccattggtaacaacaacttatgtacttgccaatatagatgtggctga

SEQ ID NO: 31 - DNA, 411 bp, Malus domestica
atggctactctatctggagctttttccaccgtccttgtcttgcttcttatattcgctgtagggacactcatgcccatggtgaaaggtgacgtttgcaccgaagatatgggtgcatgcgatcctgactgcagttcaaggtgcacatctgcacatcctggggctaaggccggttgtgatttgaacaacaacaacccggtttgcagatgcttctacgactgtggacctccatcgccgccgccatactcgaaaaagtgcaaaatcagcttgggaatatggggtgagaactgctcagagagtgattgtaactcacagtgtgcttccaaatatcctggacctcaagaaggaagtggatactgttatagcgttggagctcctttctatacttcttgtttttgtgagtacaagtgttga

SEQ ID NO: 32 - DNA, 411 bp, Medicago truncatula
atgacttcctctgctagtaaattctataccatcttcatttttgtctgccttgcctttctctttatttccacatctgaggtggaagcaaaactttgtcaaaagcgaagtacaacatggtcaggaccttgtcttaacacaggaaactgcaaaagacaatgcattaatgtggagcatgctacttttggtgcttgtcatcgtcaaggctttggttttgcttgcttctgctacaaaaaatgtgctccaaagaaggtggaacctaaactttgtgaaaggcgaagcaaaacatggtcaggaccttgtcttatctcaggaaattgtaaaagacagtgcatcaatgttgagcatgcaacttctggtgcttgtcaccgtcaaggcattggttttgcttgcttctgcaagaaaaaatgttga

SEQ ID NO: 33 - DNA, 393 bp, Medicago truncatula
atgacgaaccaaatgtcaacatctttcagtttctttgccatcttggttttagttgttgcagggcaattaatacaggtagaaggtgaatgcacaaaaattgttggtagttgtgcaaaagaagattgtgcaactcattgtcaatcatatgcaaaaggtgttgctgttttaggatcatcatgttcatactacaacttatgcacttgtacttttgataagccaccaccaggattaacaccacctggtaattgtattattgggatgggaatttgcaatggtgactgtcaagatgaatgttgcaacaaaaggtgtgttagtcgatatagtaaaacgggttctgggaattgtgtcgatgcctttggtatgattctttgtctttgttcctatgatcgttga

SEQ ID NO: 34 - DNA, 387 bp, Medicago truncatula
atggtgagccaaatgtcaagttatcttctctccttgatgctggttctttttgtagtggggcaaatgaaagtgaaaggagaaaaatgctcactatttattgctggttgtcttgacacaccagcatgtgattcttattgtaaagatcagtggagtggtggaattgggatttgtagcaatgaaagatgcatttgtaatttcgaatgtggagggaaggcaggtaaaaaagcaccaaaaagggattgtaatgcttctactggtccttgctctaaggagtgtggtgattcttgttgcaataacaaatgtgctagtaaatacaatcaaggtgtaggatattgtagatctcttctaccacctcttgctatgtgtcaatgcgtctatgcatgttaa

SEQ ID NO: 35 - DNA, 288 bp, Medicago truncatula
atgcgatccctctctaacattgtgttgcaattcctttcatcttggtttattgcttttgtaattgagatttgtagcaatgaaagatgcatttgtaatttcgaatgtggagggaaggcaggtaaaaaagcaccaaaaagggattgtaatgcttctactggtccttgctctaaggagtgtggtgattcttgttgcaataacaaatgtgctagtaaatacaatataggtgtaggatattgtagatctcttttcctacctcttgctatgtgtcaatgcgtctatgcatgttaa

SEQ ID NO: 36 - DNA, 390 bp, Medicago truncatula
atggtgaatcaaatgtcaaattacctcctctctttgatgctggttctttttgtagtaggtcaagtgacagtgaaaggatcagaaacgtgctcacaatttattgctggttgtcttgacacaccatcatgtgattcttattgcaaagagcagtatagtgatggaaatggaatttgtgccaatgaaagatgcatttgtaatttcacttgtggagggaagccaggtaaaaaagcaccaaaaagggattgtgaggttaatcttggtttttgtgataacggtggtagccctagttgcaatgacaaatgttctagtagataccaagctggtactgggtattgtgatgctagtattgacccacgttttgctacatgtacctgcctatatgtttgttaa

SEQ ID NO: 37 - DNA, 393 bp, Medicago truncatula
atggcgaagatctcaaattctctatgcatctttatcgtccttgtttccaccttcacaatgcaatcaatcctagtagaagcatgctcaagaattgtgggtaactgtggagcaatggattgcctcaaatattgtaataaccttccaggaagtccaaccggatcatgtcgttacttcaacttatgcacttgtttttacaatacgccacccccaaaaactcgaggaatacgaacttgcagtgttggatttggcctttgcgaaaattgtgatctaaactgttgcaatgaaaattgcgttaactattacgcacatgaatacaaaaatattaaagggaaatgtcttcatatccttgaccctgatccaacctattgcatttgtttgtatgaccctaaatga

SEQ ID NO: 38 - DNA, 387 bp, Medicago truncatula
atggtgaaccaaataccaaattatattctctttttgatgctgtttctttctgtagtagggaaagtgaaagtgaaaggagaaacatgcacacaaaactttaggccttttgttgacacaccaagttgtgacaattattgtaaagggcagtggagtgatggaaatgggatttgtgagtcaggaggactatgcatttgtaagttcccttgtggagggaaggcaggtaaagatcaaataacaaggaaatgcagtgtttcaactggtttttgcaacgacggtgcatcggcttgcaattcagaatgtggtaatcgatactatgcagggatagggtattgtgatggtagtatttacccacaaattcctatttgttactgccaatatgtttgttaa

SEQ ID NO: 39 - DNA, 363 bp, Portulaca oleracea
atggccatgaaaacttccttcacacatcctgttctcataatcgctgttcttttgtttagcggttgtttgacaagttgtagagcaacaaggaggaatgatctaaacccagaaggaagcggggtttgccttcctcttcaaccaagttgtacaccagaagcatgccaaaactcttgcggaggatcaaaaggagcttgtcttcgtcgtgcctctgacattgtatgttgttgtgccagcagtttaaagccacaaacaagcggaatttgctttcctcagcctaactgtaagccagatgtttgccaaaaatcttgtggcgcatccaaaggtgcttgtcttcaaggcggtactcaatgttgttgcgcataa

SEQ ID NO: 40 - DNA, 300 bp, Portulaca oleracea
tgtttgacaagatgtaaagcaacaaggaggaatgatctaaagccagaaggaagcggggtttgccttcctcttcaaccgagttgtacagcagaagcatgccaaaactcttgcggaggatcaaaaggagcttgtcttcgtcgtggctctgacattgtatgttgttgtgccagcggtttaaagccacaagcaagcggaatttgctttccccagcctaactgtaagccagatgtttgccaaaaatcatgtggcgcatccaaaggggcttgtcttcaaggcgctactcaatgttgttgcgcataa

SEQ ID NO: 41 - DNA, 393 bp, Portulaca oleracea
atggcaaaatctaatcctgcattttacgctctcctcttcatttcagcatctatagttggagtggcgttgatcaatgccgtagaaggcaaaacttgcgaagaagggatgggaatttgcgggacggactgtaaagacagatgtgcacagagacacccgggtggtgaaggatcatgtaatcatctaatatcgcctcctctatgtacttgttattatcaatgtggaccaaccccacctcctacaaaacggtgtaccattggccttggactttgtggcatagaatcttgctttaacgagtgctgtaactccaagtgcaatgcccaacaccctggaggagaaggctattgtgttaatgcagcgggtacatggttgtgtcaatgtgaatataattgttag

SEQ ID NO: 42 - DNA, 405 bp, Prunus persica
atggctactctctctcgatcttcttgcatcatcattgttctccttgtcttcactgcagggaccctaatgcccatggtgaaaggtgacgtttgcacagaagacgtaggtacatgtggtgatgactgcagttcaaggtgcgcatctgcacatcctggggcgaaggctgcctgcgttttgaacaacatcccagtttgtagatgctacttcgactgtggacctccagtcccaccgccatactcaaaaacttgcaaattaagcttgggaatatggggtgagaggtgctctgagaaggactgcaactcacagtgtgctgccaaatatcctggaccccaacaaggaatgggatactgttatagtgttggagctcctgtttatacttcttgtttttgtcaatacaagtgttag

SEQ ID NO: 43 - DNA, 414 bp, Raphanus raphanistrum
atgaagaggaaaactccagttgtattactcgttagcttacttatcatgtttgcatcaggcattgttatatctctcattgtgaatcagaccagagcaaacacctgtaccgatggactaggcacttgtgaaaactgtgaccagagatgcaaggccaaacacgggccatcaagtgaaagcaactgtgaccactctcttgtgatgcctctgtgcctatgctactatcaatgtgcaggtccgacaccgacaccgactccgactccacccaagatttgcaatggtggagctggtatatgtagtagaagctgtcccgaaacttgttgtaatactaactgcgcacaaaagtttaatggtggacatggattttgtagcaccctcggtaattttaacttgtgccaatgtcaatacccttgttaa

SEQ ID NO: 44 - DNA, 387 bp, Raphanus raphanistrum
atggagagaataactccacttgtattactcgttggcctacttatcatgtttgcctcagttgtgaatcagactagagcaaatatatgcgtcgatggactaggcacttgcgaaagctgcgaccagagatgcaagtccaaacatgggccatcaagccaaggtgactgtgatgaccgctctattggggggcctctgtgcaggtgccactaccaatgtgaatcaccctcggtgactccactcgatacttgcaatggtggggccggtttatgtagtgtaaggtgtccccaaaaatgttgcgatattaactgtgcacttaagtatgcaggtggaagtgggatgtgttacaccctcggtaattctagtgtttgccaatgcaagtatccttgttaa

SEQ ID NO: 45 - DNA, 348 bp, Raphanus raphanistrum
atgtctgcgttagttacgattgaggcacaagggaatttgtgcagagatggtctaggcacttgtgaaaactgcgacctgaaatgtaaaactaagcacggtccatcaagcgaaagcaactgcgaccatagtgttggagtggcattatgcacgtgcttttaccaatgtcatcctcctacacctccgccgccgccaacacagaaaacttgcaacagtggaactactctatgcactgaacagtgttcggacaattgctgtgacacgaactgcgcaaagtcgcatgtcggtggacatggaatttgtaattccattggtaatacccgtctttgtttgtgtgagtacccttgctag

SEQ ID NO: 46 - DNA, 297 bp, Raphanus raphanistrum
gtgaaggcagccacgtgccaagaccctctaggtagttgtctacagtgtgatgagagatgcaaagctaagcacggaccaacgggccaagcgagttgcgacagaaaccaactatgcacgtgctattacacgtgcggaccgtcatcaccaaatcctccaaagcacaaacaatgctatggtggggctggcttatgcagcagtgcatgcaatcaaaactgtgctcaaaagtatcctggtggatcaggattttgtgagagcattggcagcactagattgtgcaaatgccaatatccttgctaa

SEQ ID NO: 47 - DNA, 366 bp, Raphanus raphanistrum
atgaagaatattttttctgttgtggttttcatcatcttctttgtcatgttttcttcagttgctaataaggtaaaggcagccacatgccaagaccctctaggtagttgtctacagtgtgatgagagatgcaaagctaagcacggaccgacgggccaagcaagttgcgacagaaaccaactatgcacgtgctattacacgtgcggaccgtcatcaccaactcctccaaagcacaaacaatgctatggtggggctggcttgtgcagcagtgcatgcaatcaaaactgtgctcaaaagtatcctggtggatctggattttgtgagagcattggcagcactagattatgcaaatgccaatatccttgctaa

SEQ ID NO: 48 - DNA, 363 bp, Rosa blanda
atggctatcacatcctgcactcagattgttctccttgcttttgcatcagctgccataatggggatgatggtgaaggcagaaatatgcaacgaatcgatcggttcttgtcaaggcatcgactgcaaccaagtctgcgtcaacaaacatcccggtggctccggcacatgtgatcaaacaaacacatgcaattgctatttcgactgtccaccaagaaagacatgcaatgccggcttgggttattgcagtgccagttgtaatgaccagtgttgtgctcaaaactgtgcaagcaaatataaagatggagttggatactgtgacaccctaggctggacatcgttgtgtcaatgcaagtatagctgttag

SEQ ID NO: 49 - DNA, 390 bp, Trifolium repens
atggcaaatcaaatgtcaaaatcgtcttgtttctttgccatcttggttttacttgttgcagtccaattaatacaagttaaaggtgaatgcacaaaagttgtgggtaattgtgctgcatcagattgttcttcacattgtaattcatatgcaagaggtgctcgtgttttaggatcatcatgttcattcaacaacttatgcacttgtacttttgatcgaccaccaccaggatcagaacaaccagcttgtgatgttgggatgggaatttgcactagggattgtcaagatgattgttgcaacaacaagtgtgttagtagatttaggaatactggtcatgggagttgtgttgatgcttttaacatgattctttgtctttgttcctataaacgttga

SEQ ID NO: 50 - DNA, 474 bp, Zea mays
atgatcctgtacccagacctgccctgtgaccccgacgtgtgtgccaagagctgcgtcaagggattgaacaacggcaacggcacctgcgtgaggccgcttggatgtgattgcgtgttctgcgtgccaacagccggccaagctgcacgtacattcctctcaacgttccctgtaagaaaccagcaggacaggaggatgaggactagacacctgctgctggttgccactcccctcctcctgctcctggcagtatcctcagatttgacggccaaggtttcagctcggtgcccggacccggagtcggtaacactgtatccaggcaagccctgcaatcgccagcagtgcaagacggactgcgccagcaagtaccacggcggcgtcggcgtctgcctcaaccccaaaggatgttactgcgagtactgcctggatcgcccctccgcccacgcggcctcgccactccgtccgcgtcatgattga

SEQ ID NO: 51 - DNA, 1002 bp, Zea mays
atgagtctgcggcaatcatcagttcatcaccgattcaccatcaacaacatctccagcaacaaacctgcagcagggatgaggactagtcgcctggtgttcctatttgccatcgtccccctcctgctactgctagcatcatcaggtttgacgccgacgaaggcgtcgtccgccggatgcccgcatccccgttcgatgatcctgtacccagacctgccctgtgatcccgacgtgtgcgccaagagctgcgccaagggattgaacaacggcaacggcacctgcatgaggccgcttggatgtgattgcgagtactgcgtgccagctgcaaccgtcgcaaaacgcccggctgctgtctctacgcgtttgacgacgacgacgacgacaatggcgtcggccggatgcccgcacccccgttcgacgatcctgtacccagacctgccatgcgatcccgacgtgtgtgccaagagttgcgccaagggattgaacaacggcaacggcacctgcatgaggccgattggatgtgattgcgtgttctgcgtgccagaaaccgtcgcaaaacgcccggctgtctctacgcgtttgacgacgacgacgacgacaatggcgtcggccggatgcccgcacccccgttcgacgatcctgtacccagacctgccatgcgatcccgacgtgtgtgccaagagttgcgccaagggattgaacaacggcaacggcacctgcgtgaggccgattggatgtgattgcgtgttctgcgtgccagaaaccgtcgcaaaacgcccggctgtctctacgcgtttgacgacgacgacgacgacaatggcgtcggccggatgcccgcacccccgttcgacgatcctgtacccagacctgccctgcgatcccgacgtgtgtgccaagagttgcgccaagggattgaacaacggcaacggcacctgcgtgaggccgattggatgtgattgcgtgttctgcgtgccaacagccggccaagctgcacgtacaacgtag

SEQ ID NO: 52 - protein, 124 aa, Arabidopsis lyrata
MERTSTSLLFLVSLVIIFATVVNQIRAQTCDDKLGSCENCDQRCKAKHGPSSVSKCNGPDGMCKCTYECASFKPAKVCVGATDMCTDTCPQSCCDRQCAIKYKNGHGGCVNYAGYRMCICEYSC

SEQ ID NO: 53 - protein, 129 aa, Arabidopsis thaliana
MAITKKKLVVYTFTLLFIISYVHCQSTSASSPGFDNGEVCKQFKFNPCERGGDRGCTVFCTRKLFTRGECRDEGCWCCPSFDIGESCQGFKFNPCERGGDRGCTVFCKRKLVTRGECRDEGCWCCPGQV

SEQ ID NO: 54 - protein, 127 aa, Arabidopsis thaliana
MERITSLVFFASFLIIFVSGVNQTRADSCDESLGLCETCDERCQAKHGPSCISKCDGEVGMLSCTCTYECGPPLPPKGNVCSGGTGMCSGKCPYKCCDTSCAQKYNGGRGFCNSFGNYNFCQCEYPC

SEQ ID NO: 55 - protein, 120 aa, Arabidopsis thaliana
MERTSTSLLFLLSLLIIFASAVNQIRAQTCDENLSSCENCDQRCKAKHGPSSVSKCNGPDGTCGCASFKPAKLCIGATDMCTDKCPTSCCDRQCAIKYKNGKGGCVDYAGYRMCICEYTC

SEQ ID NO: 56 - protein, 126 aa, Arabidopsis thaliana
MEKALSLVVFIIFSIMLASVENKVNANTCIEGIGNCQQCDVRCKARHGPAAKGACDSKFQLCTCNYPCGQGPSPPQPKKCYGGAGICSDRCGAQCCNQNCAQKYNQGSGFCDSIGNTSLCKCQYNC

SEQ ID NO: 57 - protein, 122 aa, Arabidopsis thaliana
MERIPSLASLVSLLIIFATVVNQTRASICNDRLGLCDGCDQRCKAKHGPSCESKCDGPVGMLLCTCTYECGPTKLCNGGLGNCGESCNEQCCDRNCAQRYNGGHGYCNTLDDFSLCLCKYPC

SEQ ID NO: 58 - protein, 118 aa, Bassia scoparia
MMNIARGEDWCEKGLGICGPGTDCEDKCKQLDPSYVGICNREIRPPVCSCHYPCPSPPSPPGPPKKCTDNGGVCSEKCDDGCCLANCKNKFPSKDEVSGSCQDGVGTSIRLCLCEYDC

SEQ ID NO: 59 - protein, 134 aa, Brassica napus
MERITPVVLLVSLLIMFASGIVMSLNFVNQTRAKCADGLGTCENCDERCKAKHGPSSESICDRSLGMPLCMCYYQCATPPTPTPPKICNGGAGLCSARCLGSCCDTNCAQKFNGGHGFCSTLGTFSLCQCQYPC

SEQ ID NO: 60 - protein, 110 aa, Brassica napus
MIEAQGNLCRDGLGTCEDCDQKCKTKHGPSSESSCDRSVGVALCTCFYQCTPPTPPSPPTRPTCNSGTTLCTEQCSDSCCDTNCAQSHDGGHGICNSIGNTRLCLCEYPC

SEQ ID NO: 61 - protein, 122 aa, Brassica napus
MKNTFSLVVVIIFFVMLSSVANKVKANSCQDPLGSCLQCDERCKAKHGPTGQASCDSRNQLCTCYYTCGPPSPTPPHHKQCYGGTGLCSSACNQNCAQKYLGGSGFCESIGISRLCKCQYPC

SEQ ID NO: 62 - protein, 127 aa, Brassica napus
MERITPLVLLVSLLIISASVVNRTRADMCVDVLDTCEYCDQRCKSKHGPSGQGDCESSTGMPMCRCHYQCEPPSLTPLNTCNGGAGLCSVRCPQKCCDINCALKFIGGSGMCFTVGNTSVCQCKYPC

SEQ ID NO: 63 - protein, 119 aa, Brassica napus
FNDVYNVTVVNQTRANICVDGLGTCEICDQRCKSKHGPSGHGDCDDRSTGVPMCRCHYQCEPPSLTSTPLNTCNGGAGLCSVNCPQKCCDINCALKFIGGSGMCLTLGNTSVCQCKYPC

SEQ ID NO: 64 - protein, 127 aa, Brassica napus
MERITQLILLVSLLIISASVVNQTRADMCVDGLYTCDYCEQRCKSKHGPSGQGECETHTGMPMCMCHYQCEPPSLTPLNTCNGGAGLCSVRCPQKCCDVNCALKFTGGSGMCFTLGNTSVCQCKYPC

SEQ ID NO: 65 - protein, 122 aa, Brassica napus
MERGSSRVFLFIFFIMLASDANKVMAKPCNNNLGDCQQCDERCKAKHGPTCQGSCDNTFKQCICNNESASPASKICYSGAGLCTTKCWDECCNKTCASMYLNGVGYCDSIGHINLCKCQYPC

SEQ ID NO: 66 - protein, 122 aa, Brassica napus
MERESSRVFLFTFFIMLASDANKMMAKPCNNNLGDCQQCDERCKTKYGPTCQGSCDNTCKQCLCNNESASPASKICYSGAGLCTPKCWDECCNKTCASMYLNGVGYCDSIGHINLCKCQYPC

SEQ ID NO: 67 - protein, 111 aa, Brasicca Rapa
MASKITFFFLLALVISCATMVSIPTVEAQVFLPCKTAKDCEYLHCSSGTGQCVKSQCQCSGSLTRKAKIDSFKTTSYAQTCKVTSDCDPSMKPSCVSGSYMCFNGFCTCTH

SEQ ID NO: 68 - protein, 120 aa, Brasicca Rapa
MQRTTSLVFLVNFLIIFTSVVNQSRAGTCVETEGPCENCDQKCLAKFGPSVNTQCGNSQCLCIYECPPSPPKVCNGGAGLCSQNCPEKCCDTNCATKFNGGHGSCVTLGNFSLCQCEYPC

SEQ ID NO: 69 - protein, 134 aa, Carica papaya
MESYSFKSTSLFVILVLCLLHNVKARTSQSEESFSTETRCKRDIECMSCPHGGFCDMKTGKCSCLPLSTQAQCERDVDCMGACPHGGFCDMKNGKCSCLPLSTQARCKRDVDCMGACPHGGFCDMKNGRCSCLP

SEQ ID NO: 70 - protein, 140 aa, Carica papaya
MAKLLNPAFQSFLLAFVFLGFNICITVAGSLKNISGDADICSEPLGYCGNDCESRCLARHIGVETQGSCDYTLKVPLCTCYYSCNLQPPPPETCNDGLGYCTVACEEDCCNRKCSEKHYQGRGLCNEIGTIKLCQCQYPC

SEQ ID NO: 71 - protein, 128 aa, Carica papaya
MAKYSFIAIILLLAFERGLLVDGEICSDDLGYCDNICDSNCKSIHPKGNGTCVEDEASVMVCRCSYFCLSPPPRRRCNVGIDRCTAACNEKCCDENCMSKFPEHLNCHGSCSDLLPPQFSVCICAYDC

SEQ ID NO: 72 - protein, 131 aa, Citrus clementina
MYDSKDSFALIFLLLIAGTALLPAAKGKICIEDFGTPCSEGSCERTCESKHANGLGDCDVDESCKCFYDCEANPSRKLCKEDLGLYPRGCTAQQCQNDCANKFPGSKDNVHGYCYGPDIYPDQSCRCAYFC

SEQ ID NO: 73 - protein, 134 aa, Citrus clementina
VSPALFFLVLIAGTTLLPVTKGKICIEDFGPNCSGGDCETKCESKHKNGLGDCDVGESCKCYYDCEAKPPRKLCKSDLGLYPRGCAAQQCQKDCENEFHGYSKEDVHGYCYGHDIYPDQSCRCAYFCPSFKHNG

SEQ ID NO: 74 - protein, 136 aa, Citrus clementina
MKKVSSSPSNASLLFLFSLLAVTMLVEVKGQICSENYGSCDGRTTPDCNKFCASNRPRGNGSCDATDYCRCFYPCAGRGDKKLCKYYVGPNPQGGCSDEDCDSTCSQKFPGSDQDGHGLCQAVEYPNLACYCIHLC

SEQ ID NO: 75 - protein, 130 aa, Citrus clementina
MEIGDKLLLIQLINLRGNVVHTIKGDTCQEGLGQCGASNDCDLQCKTRHAGQGQGSCDRTIQPPLCTCFYPCGSPSKRPPSPKKCTAGLGACDQCRDLCCNGKCAAQFKGGQGFCDNIGAQYLCQCTYDC

SEQ ID NO: 76 - protein, 137 aa, Citrus sinensis
MKKVSSSPSNASLLFLFSLLAGVTMLVEVKGQICCENYGSCDGRTTPDCNTFCASNRPRGNGSCDATDYCRCFYPCAGRGDKKLCKYYVGPNPQGGCSDEDCDSTCSQKFPGYDQDGHGLCQAVEYPNLACYCIHLC

SEQ ID NO: 77 - protein, 123 aa, Citrus sinensis
LLIQLINLRGNVVHTIKGDTCQEGLGQCGASNDCDLHCKTRHAGQGQGSCDRTIQPPLCTCFYPCGSPSKRPSSPKKCTAGLGACDQCRDLCCNGKCAAQFKGGQGFCDNIGAQYLCQCTYDC

SEQ ID NO: 78 - protein, 115 aa, Cucumis melo
MTPVVGNKNICSEGLGPCGTNCDARCKAKHSPIENPQGSCDQIGSNLSLCYCLYTCGIPTPKPNPPQNCISGLGLCTGQCKSDCCNAKCRRQYQGGEGYCDTNVGVPLCQCSHPC

SEQ ID NO: 79 - protein, 115 aa, Cucumis sativus
MTPVVGNKDICTEGLGPCGTNCDARCKAQHSPNENPQGSCDQIGSSISLCNCLYSCDRSTPMPKPPLNCISGLGLCTAQCKSDCCNAKCGQQYKGGEGFCDTNVGVSLCQCSHPC

SEQ ID NO: 80 - protein, 137 aa, Glycine max
MVNRISNYVPLFIILIVLVTGQKQVEGYKCLTDMGLCDERITSSECDLRCKSHYNDGEGHCDNMNICNCIHHCVSPQPNKDTEPIRKCTSGLGLCSIDHCYDDCCNSKCAKQFKEGIGHCEIVGSMGTILCTCDYVC

SEQ ID NO: 81 - protein, 129 aa, Glycine max
MVTYISNYSLLFVMLALTITGLIEVKGNTCSQPLGGCGPMGQCDQRCKALHIDGQGSCDLGLCTCYYGCAGPPPSPTPPKICNNGLGVCTLQCGDACCNANCARKYNQGTGMCSTIGNNNLCTCQYRCG

SEQ ID NO: 82 - protein, 136 aa, Malus domestica
MATLSGAFSTVLVLLLIFAVGTLMPMVKGDVCTEDMGACDPDCSSRCTSAHPGAKAGCDLNNNNPVCRCFYDCGPPSPPPYSKKCKISLGIWGENCSESDCNSQCASKYPGPQEGSGYCYSVGAPFYTSCFCEYKC

SEQ ID NO: 83 - protein, 136 aa, Medicago truncatula
MTSSASKFYTIFIFVCLAFLFISTSEVEAKLCQKRSTTWSGPCLNTGNCKRQCINVEHATFGACHRQGFGFACFCYKKCAPKKVEPKLCERRSKTWSGPCLISGNCKRQCINVEHATSGACHRQGIGFACFCKKKC

SEQ ID NO: 84 - protein, 130 aa, Medicago truncatula
MTNQMSTSFSFFAILVLVVAGQLIQVEGECTKIVGSCAKEDCATHCQSYAKGVAVLGSSCSYYNLCTCTFDKPPPGLTPPGNCIIGMGICNGDCQDECCNKRCVSRYSKTGSGNCVDAFGMILCLCSYDR

SEQ ID NO: 85 - protein, 128 aa, Medicago truncatula
MVSQMSSYLLSLMLVLFVVGQMKVKGEKCSLFIAGCLDTPACDSYCKDQWSGGIGICSNERCICNFECGGKAGKKAPKRDCNASTGPCSKECGDSCCNNKCASKYNQGVGYCRSLLPPLAMCQCVYAC

SEQ ID NO: 86 - protein, 95 aa, Medicago truncatula
MRSLSNIVLQFLSSWFIAFVIEICSNERCICNFECGGKAGKKAPKRDCNASTGPCSKECGDSCCNNKCASKYNIGVGYCRSLFLPLAMCQCVYAC

SEQ ID NO: 87 - protein, 129 aa, Medicago truncatula
MVNQMSNYLLSLMLVLFVVGQVTVKGSETCSQFIAGCLDTPSCDSYCKEQYSDGNGICANERCICNFTCGGKPGKKAPKRDCEVNLGFCDNGGSPSCNDKCSSRYQAGTGYCDASIDPRFATCTCLYVC

SEQ ID NO: 88 - protein, 130 aa, Medicago truncatula
MAKISNSLCIFIVLVSTFTMQSILVEACSRIVGNCGAMDCLKYCNNLPGSPTGSCRYFNLCTCFYNTPPPKTRGIRTCSVGFGLCENCDLNCCNENCVNYYAHEYKNIKGKCLHILDPDPTYCICLYDPK

SEQ ID NO: 89 - protein, 128 aa, Medicago truncatula
MVNQIPNYILFLMLFLSVVGKVKVKGETCTQNFRPFVDTPSCDNYCKGQWSDGNGICESGGLCICKFPCGGKAGKDQITRKCSVSTGFCNDGASACNSECGNRYYAGIGYCDGSIYPQIPICYCQYVC

SEQ ID NO: 90 - protein, 120 aa, Portulaca oleracea
MAMKTSFTHPVLIIAVLLFSGCLTSCRATRRNDLNPEGSGVCLPLQPSCTPEACQNSCGGSKGACLRRASDIVCCCASSLKPQTSGICFPQPNCKPDVCQKSCGASKGACLQGGTQCCCA

SEQ ID NO: 91 - protein, 99 aa, Portulaca oleracea
CLTRCKATRRNDLKPEGSGVCLPLQPSCTAEACQNSCGGSKGACLRRGSDIVCCCASGLKPQASGICFPQPNCKPDVCQKSCGASKGACLQGATQCCCA

SEQ ID NO: 92 - protein, 130 aa, Portulaca oleracea
MAKSNPAFYALLFISASIVGVALINAVEGKTCEEGMGICGTDCKDRCAQRHPGGEGSCNHLISPPLCTCYYQCGPTPPPTKRCTIGLGLCGIESCFNECCNSKCNAQHPGGEGYCVNAAGTWLCQCEYNC

SEQ ID NO: 93 - protein, 134 aa, Prunus persica
MATLSRSSCIIIVLLVFTAGTLMPMVKGDVCTEDVGTCGDDCSSRCASAHPGAKAACVLNNIPVCRCYFDCGPPVPPPYSKTCKLSLGIWGERCSEKDCNSQCAAKYPGPQQGMGYCYSVGAPVYTSCFCQYKC

SEQ ID NO: 94 - protein, 137 aa, Raphanus raphanistrum
MKRKTPVVLLVSLLIMFASGIVISLIVNQTRANTCTDGLGTCENCDQRCKAKHGPSSESNCDHSLVMPLCLCYYQCAGPTPTPTPTPPKICNGGAGICSRSCPETCCNTNCAQKFNGGHGFCSTLGNFNLCQCQYPC

SEQ ID NO: 95 - protein, 128 aa, Raphanus raphanistrum
MERITPLVLLVGLLIMFASVVNQTRANICVDGLGTCESCDQRCKSKHGPSSQGDCDDRSIGGPLCRCHYQCESPSVTPLDTCNGGAGLCSVRCPQKCCDINCALKYAGGSGMCYTLGNSSVCQCKYPC

SEQ ID NO: 96 - protein, 115 aa, Raphanus raphanistrum
MSALVTIEAQGNLCRDGLGTCENCDLKCKTKHGPSSESNCDHSVGVALCTCFYQCHPPTPPPPPTQKTCNSGTTLCTEQCSDNCCDTNCAKSHVGGHGICNSIGNTRLCLCEYPC

SEQ ID NO: 97 - protein, 98 aa, Raphanus raphanistrum
VKAATCQDPLGSCLQCDERCKAKHGPTGQASCDRNQLCTCYYTCGPSSPNPPKHKQCYGGAGLCSSACNQNCAQKYPGGSGFCESIGSTRLCKCQYPC

SEQ ID NO: 98 - protein, 121 aa, Raphanus raphanistrum
MKNIFSVVVFIIFFVMFSSVANKVKAATCQDPLGSCLQCDERCKAKHGPTGQASCDRNQLCTCYYTCGPSSPTPPKHKQCYGGAGLCSSACNQNCAQKYPGGSGFCESIGSTRLCKCQYPC

SEQ ID NO: 99 - protein, 120 aa, Rosa blanda
MAITSCTQIVLLAFASAAIMGMMVKAEICNESIGSCQGIDCNQVCVNKHPGGSGTCDQTNTCNCYFDCPPRKTCNAGLGYCSASCNDQCCAQNCASKYKDGVGYCDTLGWTSLCQCKYSC

SEQ ID NO: 100 - protein, 129 aa, Trifolium repens
MANQMSKSSCFFAILVLLVAVQLIQVKGECTKVVGNCAASDCSSHCNSYARGARVLGSSCSFNNLCTCTFDRPPPGSEQPACDVGMGICTRDCQDDCCNNKCVSRFRNTGHGSCVDAFNMILCLCSYKR

SEQ ID NO: 101 - protein, 157 aa, Zea mays
MILYPDLPCDPDVCAKSCVKGLNNGNGTCVRPLGCDCVFCVPTAGQAARTFLSTFPVRNQQDRRMRTRHLLLVATPLLLLLAVSSDLTAKVSARCPDPESVTLYPGKPCNRQQCKTDCASKYHGGVGVCLNPKGCYCEYCLDRPSAHAASPLRPRHD

SEQ ID NO: 102 - protein, 333 aa, Zea mays
MSLRQSSVHHRFTINNISSNKPAAGMRTSRLVFLFAIVPLLLLLASSGLTPTKASSAGCPHPRSMILYPDLPCDPDVCAKSCAKGLNNGNGTCMRPLGCDCEYCVPAATVAKRPAAVSTRLTTTTTTMASAGCPHPRSTILYPDLPCDPDVCAKSCAKGLNNGNGTCMRPIGCDCVFCVPETVAKRPAVSTRLTTTTTTMASAGCPHPRSTILYPDLPCDPDVCAKSCAKGLNNGNGTCVRPIGCDCVFCVPETVAKRPAVSTRLTTTTTTMASAGCPHPRSTILYPDLPCDPDVCAKSCAKGLNNGNGTCVRPIGCDCVFCVPTAGQAARTT

SEQ ID NO: 103 - DNA, 21 bp, Arabidopsis lyrata
gcgtcatttaaaccagccaaa

SEQ ID NO: 104 - DNA, 24 bp, Arabidopsis thaliana
cctagttttgacatcggggaaagt

SEQ ID NO: 105 - DNA, 30 bp, Arabidopsis thaliana
ggaccacctttaccccccaaaggtaacgtt

SEQ ID NO: 106 - DNA, 24 bp, Arabidopsis thaliana
gcctcatttaaaccagccaaactg

SEQ ID NO: 107 - DNA, 54 bp, Arabidopsis thaliana
ggacagggtccatcgcctccgcagcccaaaaaatgttatggtggagctggcatt

SEQ ID NO: 108 - DNA, 15 bp, Arabidopsis thaliana
ggtccaacaaagctt

SEQ ID NO: 109 - DNA, 30 bp, Bassia scoparia
ccttctcccccttctcctcccggtccgccg

SEQ ID NO: 110 - DNA, 30 bp, Brassica napus
gcaaccccaccgactccgactccacccaag

SEQ ID NO: 111 - DNA, 36 bp, Brassica napus
actcctcctacacctccgtcgcccccgacacggccc

SEQ ID NO: 112 - DNA, 33 bp, Brassica napus
ggaccgccatcaccaactcctccacatcacaaa

SEQ ID NO: 113 - DNA, 27 bp, Brassica napus
gaaccaccctcgctgactccactcaat

SEQ ID NO: 114 - DNA, 33 bp, Brassica napus
gaaccaccctcgctgacgtcgactccactcaat

SEQ ID NO: 115 - DNA, 30 bp, Brassica napus
aacaacgagagtgcatcaccagcgtccaaa

SEQ ID NO: 116 - DNA, 63 bp, Brasicca Rapa
agcggctcgctgactcgtaaagctaaaatcgacagctttaaaacgacgagttatgctcagacg

SEQ ID NO: 117 - DNA, 21 bp, Brasicca Rapa
ccaccttcaccgcctaaagta

SEQ ID NO: 118 - DNA, 24 bp, Carica papaya
ttgccattgtcaacacaggcgcag

SEQ ID NO: 119 - DNA, 24 bp, Carica papaya
gattatacactgaaggtgccacta

SEQ ID NO: 120 - DNA, 9 bp, Carica papaya
tcgtatttc

SEQ ID NO: 121 - DNA, 9 bp, Citrus clementina
ttctacgac

SEQ ID NO: 122 - DNA, 24 bp, Citrus clementina
gaagccaaaccaccaagaaaatta

SEQ ID NO: 123 - DNA, 21 bp, Citrus clementina
gctggtcgtggtgataaaaaa

SEQ ID NO: 124 - DNA, 33 bp, Citrus clementina
ggctctccgtcgaaacggccgccatcgcccaaa

SEQ ID NO: 125 - DNA, 9 bp, Citrus sinensis
ttttatcct

SEQ ID NO: 126 - DNA, 30 bp, Citrus sinensis
ggctctccgtcgaaacggccgtcatcgccc

SEQ ID NO: 127 - DNA, 36 bp, Cucumis melo
ggcattccgacgccgaagccgaacccaccacaaaac

SEQ ID NO: 128 - DNA, 36 bp, Cucumis sativus
gacaggtcgacgccgatgccgaagccaccactaaac

SEQ ID NO: 129 - DNA, 9 bp, Glycine max
attcaccat

SEQ ID NO: 130 - DNA, 36 bp, Glycine max
gcagggcctccaccaagtccaaccccacctaaaata

SEQ ID NO: 131 - DNA, 30 bp, Malus domestica
ggacctccatcgccgccgccatactcgaaa

SEQ ID NO: 132 - DNA, 21 bp, Medicago truncatula
gctccaaagaaggtggaacct

SEQ ID NO: 133 - DNA, 39 bp, Medicago truncatula
acttttgataagccaccaccaggattaacaccacctggt

SEQ ID NO: 134 - DNA, 30 bp, Medicago truncatula
ggagggaaggcaggtaaaaaagcaccaaaa

SEQ ID NO: 135 - DNA, 36 bp, Medicago truncatula
ggagggaaggcaggtaaaaaagcaccaaaaagggat

SEQ ID NO: 136 - DNA, 27 bp, Medicago truncatula
ggagggaagccaggtaaaaaagcacca

SEQ ID NO: 137 - DNA, 42 bp, Medicago truncatula
ttttacaatacgccacccccaaaaactcgaggaatacgaact

SEQ ID NO: 138 - DNA, 30 bp, Medicago truncatula
ggagggaaggcaggtaaagatcaaataaca

SEQ ID NO: 139 - DNA, 27 bp, Portulaca oleracea
gccagcagtttaaagccacaaacaagc

SEQ ID NO: 140 - DNA, 27 bp, Portulaca oleracea
gccagcggtttaaagccacaagcaagc

SEQ ID NO: 141 - DNA, 21 bp, Portulaca oleracea
ggaccaaccccacctcctaca

SEQ ID NO: 142 - DNA, 9 bp, Prunus persica
tacttcgac

SEQ ID NO: 143 - DNA, 36 bp, Raphanus raphanistrum
gcaggtccgacaccgacaccgactccgactccaccc

SEQ ID NO: 144 - DNA, 24 bp, Raphanus raphanistrum
gaatcaccctcggtgactccactc

SEQ ID NO: 145 - DNA, 33 bp, Raphanus raphanistrum
catcctcctacacctccgccgccgccaacacag

SEQ ID NO: 146 - DNA, 30 bp, Raphanus raphanistrum
ggaccgtcatcaccaaatcctccaaagcac

SEQ ID NO: 147 - DNA, 30 bp, Raphanus raphanistrum
ggaccgtcatcaccaactcctccaaagcac

SEQ ID NO: 148 - DNA, 9 bp, Rosa blanda
ccaccaaga

SEQ ID NO: 149 - DNA, 36 bp, Trifolium repens
acttttgatcgaccaccaccaggatcagaacaacca

SEQ ID NO: 150 - DNA, 162 bp, Zea mays
gtgccaacagccggccaagctgcacgtacattcctctcaacgttccctgtaagaaaccagcaggacaggaggatgaggactagacacctgctgctggttgccactcccctcctcctgctcctggcagtatcctcagatttgacggccaaggtttcagctcgg

SEQ ID NO: 151 - DNA, 84 bp, Zea mays
gtgccagctgcaaccgtcgcaaaacgcccggctgctgtctctacgcgtttgacgacgacgacgacgacaatggcgtcggccgga

SEQ ID NO: 152 - DNA, 78 bp, Zea mays
gtgccagaaaccgtcgcaaaacgcccggctgtctctacgcgtttgacgacgacgacgacgacaatggcgtcggccgga

SEQ ID NO: 153 - protein, 7 aa, Arabidopsis lyrata
ASFKPAK

SEQ ID NO: 154 - protein, 8 aa, Arabidopsis thaliana
PSFDIGES

SEQ ID NO: 155 - protein, 10 aa, Arabidopsis thaliana
GPPLPPKGNV

SEQ ID NO: 156 - protein, 8 aa, Arabidopsis thaliana
ASFKPAKL

SEQ ID NO: 157 - protein, 18 aa, Arabidopsis thaliana
GQGPSPPQPKKCYGGAGI

SEQ ID NO: 158 - protein, 5 aa, Arabidopsis thaliana
GPTKL

SEQ ID NO: 159 - protein, 10 aa, Bassia scoparia
PSPPSPPGPP

SEQ ID NO: 160 - protein, 10 aa, Brassica napus
ATPPTPTPPK

SEQ ID NO: 161 - protein, 12 aa, Brassica napus
TPPTPPSPPTRP

SEQ ID NO: 162 - protein, 11 aa, Brassica napus
GPPSPTPPHHK

SEQ ID NO: 163 - protein, 9 aa, Brassica napus
EPPSLTPLN

SEQ ID NO: 164 - protein, 11 aa, Brassica napus
EPPSLTSTPLN

SEQ ID NO: 165 - protein, 10 aa, Brassica napus
NNESASPASK

SEQ ID NO: 166 - protein, 21 aa, Brasicca Rapa
SGSLTRKAKIDSFKTTSYAQT

SEQ ID NO: 167 - protein, 7 aa, Brasicca Rapa
PPSPPKV

SEQ ID NO: 168 - protein, 8 aa, Carica papaya
LPLSTQAQ

SEQ ID NO: 169 - protein, 8 aa, Carica papaya
DYTLKVPL

SEQ ID NO: 170 - protein, 3 aa, Carica papaya
SYF

SEQ ID NO: 171 - protein, 3 aa, Citrus clementina
FYD

SEQ ID NO: 172 - protein, 8 aa, Citrus clementina
EAKPPRKL

SEQ ID NO: 173 - protein, 7 aa, Citrus clementina
AGRGDKK

SEQ ID NO: 174 - protein, 11 aa, Citrus clementina
GSPSKRPPSPK

SEQ ID NO: 175 - protein, 3 aa, Citrus sinensis
FYP

SEQ ID NO: 176 - protein, 10 aa, Citrus sinensis
GSPSKRPSSP

SEQ ID NO: 177 - protein, 12 aa, Cucumis melo
GIPTPKPNPPQN

SEQ ID NO: 178 - protein, 12 aa, Cucumis sativus
DRSTPMPKPPLN

SEQ ID NO: 179 - protein, 3 aa, Glycine max
IHH

SEQ ID NO: 180 - protein, 12 aa, Glycine max
AGPPPSPTPPKI

SEQ ID NO: 181 - protein, 10 aa, Malus domestica
GPPSPPPYSK

SEQ ID NO: 182 - protein, 7 aa, Medicago truncatula
APKKVEP

SEQ ID NO: 183 - protein, 13 aa, Medicago truncatula
TFDKPPPGLTPPG

SEQ ID NO: 184 - protein, 10 aa, Medicago truncatula
GGKAGKKAPK

SEQ ID NO: 185 - protein, 12 aa, Medicago truncatula
GGKAGKKAPKRD

SEQ ID NO: 186 - protein, 9 aa, Medicago truncatula
GGKPGKKAP

SEQ ID NO: 187 - protein, 14 aa, Medicago truncatula
FYNTPPPKTRGIRT

SEQ ID NO: 188 - protein, 10 aa, Medicago truncatula
GGKAGKDQIT

SEQ ID NO: 189 - protein, 9 aa, Portulaca oleracea
ASSLKPQTS

SEQ ID NO: 190 - protein, 9 aa, Portulaca oleracea
ASGLKPQAS

SEQ ID NO: 191 - protein, 7 aa, Portulaca oleracea
GPTPPPT

SEQ ID NO: 192 - protein, 3 aa, Prunus persica
YFD

SEQ ID NO: 193 - protein, 12 aa, Raphanus raphanistrum
AGPTPTPTPTPP

SEQ ID NO: 194 - protein, 8 aa, Raphanus raphanistrum
ESPSVTPL

SEQ ID NO: 195 - protein, 11 aa, Raphanus raphanistrum
HPPTPPPPPTQ

SEQ ID NO: 196 - protein, 10 aa, Raphanus raphanistrum
GPSSPNPPKH

SEQ ID NO: 197 - protein, 10 aa, Raphanus raphanistrum
GPSSPTPPKH

SEQ ID NO: 198 - protein, 3 aa, Rosa blanda
PPR

SEQ ID NO: 199 - protein, 12 aa, Trifolium repens
TFDRPPPGSEQP

SEQ ID NO: 200 - protein, 54 aa, Zea mays
VPTAGQAARTFLSTFPVRNQQDRRMRTRHLLLVATPLLLLLAVSSDLTAKVSAR

SEQ ID NO: 201 - protein, 28 aa, Zea mays
VPAATVAKRPAAVSTRLTTTTTTMASAG

SEQ ID NO: 202 - protein, 26 aa, Zea mays
VPETVAKRPAVSTRLTTTTTTMASAG

SEQ ID NO: 203 - DNA, 411 bp, Artificial Sequence
  chimeric material
atggcgctgtctcgccgcatgggcgctcccgtcctcatccttgtgctcctcctcgtcgccacagagctggggacgaccaaggtggcggaggcgaggcactgcctgtcgcagagccaccggttcaagggcctgtgcatgagcagcaacaactgcgccaacgtgtgccagaccgagaacttccccggcggcgagtgcaaggcggagggcgccacgcgcaagtgcttctgcaagaagatatgcgcgtcatttaaaccagccaaaaggcactgcctgtcgcagagccaccggttcaagggcctgtgcatgagcagcaacaactgcgccaacgtgtgccagaccgagaacttccccggcggcgagtgcaaggcggagggcgccacgcgcaagtgcttctgcaagaagatatgctag

SEQ ID NO: 204 - DNA, 420 bp, Artificial Sequence
  chimeric material
atggcgctgtctcgccgcatgggcgctcccgtcctcatccttgtgctcctcctcgtcgccacagagctggggacgaccaaggtggcggaggcgaggcactgcctgtcgcagagccaccggttcaagggcctgtgcatgagcagcaacaactgcgccaacgtgtgccagaccgagaacttccccggcggcgagtgcaaggcggagggcgccacgcgcaagtgcttctgcaagaagatatgcgcaaccccaccgactccgactccacccaagaggcactgcctgtcgcagagccaccggttcaagggcctgtgcatgagcagcaacaactgcgccaacgtgtgccagaccgagaacttccccggcggcgagtgcaaggcggagggcgccacgcgcaagtgcttctgcaagaagatatgctag

SEQ ID NO: 205 - DNA, 426 bp, Artificial Sequence
  chimeric material
atggcgctgtctcgccgcatgggcgctcccgtcctcatccttgtgctcctcctcgtcgccacagagctggggacgaccaaggtggcggaggcgaggcactgcctgtcgcagagccaccggttcaagggcctgtgcatgagcagcaacaactgcgccaacgtgtgccagaccgagaacttccccggcggcgagtgcaaggcggagggcgccacgcgcaagtgcttctgcaagaagatatgcactcctcctacacctccgtcgcccccgacacggcccaggcactgcctgtcgcagagccaccggttcaagggcctgtgcatgagcagcaacaactgcgccaacgtgtgccagaccgagaacttccccggcggcgagtgcaaggcggagggcgccacgcgcaagtgcttctgcaagaagatatgctag

SEQ ID NO: 206 - DNA, 423 bp, Artificial Sequence
  chimeric material
atggcgctgtctcgccgcatgggcgctcccgtcctcatccttgtgctcctcctcgtcgccacagagctggggacgaccaaggtggcggaggcgaggcactgcctgtcgcagagccaccggttcaagggcctgtgcatgagcagcaacaactgcgccaacgtgtgccagaccgagaacttccccggcggcgagtgcaaggcggagggcgccacgcgcaagtgcttctgcaagaagatatgcggaccgccatcaccaactcctccacatcacaaaaggcactgcctgtcgcagagccaccggttcaagggcctgtgcatgagcagcaacaactgcgccaacgtgtgccagaccgagaacttccccggcggcgagtgcaaggcggagggcgccacgcgcaagtgcttctgcaagaagatatgctag

SEQ ID NO: 207 - DNA, 417 bp, Artificial Sequence
  chimeric material
atggcgctgtctcgccgcatgggcgctcccgtcctcatccttgtgctcctcctcgtcgccacagagctggggacgaccaaggtggcggaggcgaggcactgcctgtcgcagagccaccggttcaagggcctgtgcatgagcagcaacaactgcgccaacgtgtgccagaccgagaacttccccggcggcgagtgcaaggcggagggcgccacgcgcaagtgcttctgcaagaagatatgcgaaccaccctcgctgactccactcaataggcactgcctgtcgcagagccaccggttcaagggcctgtgcatgagcagcaacaactgcgccaacgtgtgccagaccgagaacttccccggcggcgagtgcaaggcggagggcgccacgcgcaagtgcttctgcaagaagatatgctag

SEQ ID NO: 208 - DNA, 423 bp, Artificial Sequence
  chimeric material
atggcgctgtctcgccgcatgggcgctcccgtcctcatccttgtgctcctcctcgtcgccacagagctggggacgaccaaggtggcggaggcgaggcactgcctgtcgcagagccaccggttcaagggcctgtgcatgagcagcaacaactgcgccaacgtgtgccagaccgagaacttccccggcggcgagtgcaaggcggagggcgccacgcgcaagtgcttctgcaagaagatatgcgaaccaccctcgctgacgtcgactccactcaataggcactgcctgtcgcagagccaccggttcaagggcctgtgcatgagcagcaacaactgcgccaacgtgtgccagaccgagaacttccccggcggcgagtgcaaggcggagggcgccacgcgcaagtgcttctgcaagaagatatgctag

SEQ ID NO: 209 - DNA, 420 bp, Artificial Sequence
  chimeric material
atggcgctgtctcgccgcatgggcgctcccgtcctcatccttgtgctcctcctcgtcgccacagagctggggacgaccaaggtggcggaggcgaggcactgcctgtcgcagagccaccggttcaagggcctgtgcatgagcagcaacaactgcgccaacgtgtgccagaccgagaacttccccggcggcgagtgcaaggcggagggcgccacgcgcaagtgcttctgcaagaagatatgcaacaacgagagtgcatcaccagcgtccaaaaggcactgcctgtcgcagagccaccggttcaagggcctgtgcatgagcagcaacaactgcgccaacgtgtgccagaccgagaacttccccggcggcgagtgcaaggcggagggcgccacgcgcaagtgcttctgcaagaagatatgctag

SEQ ID NO: 210 - DNA, 411 bp, Artificial Sequence
  chimeric material
atggcgctgtctcgccgcatgggcgctcccgtcctcatccttgtgctcctcctcgtcgccacagagctggggacgaccaaggtggcggaggcgaggcactgcctgtcgcagagccaccggttcaagggcctgtgcatgagcagcaacaactgcgccaacgtgtgccagaccgagaacttccccggcggcgagtgcaaggcggagggcgccacgcgcaagtgcttctgcaagaagatatgcgctggtcgtggtgataaaaaaaggcactgcctgtcgcagagccaccggttcaagggcctgtgcatgagcagcaacaactgcgccaacgtgtgccagaccgagaacttccccggcggcgagtgcaaggcggagggcgccacgcgcaagtgcttctgcaagaagatatgctag

SEQ ID NO: 211 - DNA, 423 bp, Artificial Sequence
  chimeric material
atggcgctgtctcgccgcatgggcgctcccgtcctcatccttgtgctcctcctcgtcgccacagagctggggacgaccaaggtggcggaggcgaggcactgcctgtcgcagagccaccggttcaagggcctgtgcatgagcagcaacaactgcgccaacgtgtgccagaccgagaacttccccggcggcgagtgcaaggcggagggcgccacgcgcaagtgcttctgcaagaagatatgcggctctccgtcgaaacggccgccatcgcccaaaaggcactgcctgtcgcagagccaccggttcaagggcctgtgcatgagcagcaacaactgcgccaacgtgtgccagaccgagaacttccccggcggcgagtgcaaggcggagggcgccacgcgcaagtgcttctgcaagaagatatgctag

SEQ ID NO: 212 - DNA, 420 bp, Artificial Sequence
  chimeric material
atggcgctgtctcgccgcatgggcgctcccgtcctcatccttgtgctcctcctcgtcgccacagagctggggacgaccaaggtggcggaggcgaggcactgcctgtcgcagagccaccggttcaagggcctgtgcatgagcagcaacaactgcgccaacgtgtgccagaccgagaacttccccggcggcgagtgcaaggcggagggcgccacgcgcaagtgcttctgcaagaagatatgcggacctccatcgccgccgccatactcgaaaaggcactgcctgtcgcagagccaccggttcaagggcctgtgcatgagcagcaacaactgcgccaacgtgtgccagaccgagaacttccccggcggcgagtgcaaggcggagggcgccacgcgcaagtgcttctgcaagaagatatgctag

SEQ ID NO: 213 - DNA, 411 bp, Artificial Sequence
  chimeric material
atggcgctgtctcgccgcatgggcgctcccgtcctcatccttgtgctcctcctcgtcgccacagagctggggacgaccaaggtggcggaggcgaggcactgcctgtcgcagagccaccggttcaagggcctgtgcatgagcagcaacaactgcgccaacgtgtgccagaccgagaacttccccggcggcgagtgcaaggcggagggcgccacgcgcaagtgcttctgcaagaagatatgcgctccaaagaaggtggaacctaggcactgcctgtcgcagagccaccggttcaagggcctgtgcatgagcagcaacaactgcgccaacgtgtgccagaccgagaacttccccggcggcgagtgcaaggcggagggcgccacgcgcaagtgcttctgcaagaagatatgctag

SEQ ID NO: 214 - DNA, 429 bp, Artificial Sequence
  chimeric material
atggcgctgtctcgccgcatgggcgctcccgtcctcatccttgtgctcctcctcgtcgccacagagctggggacgaccaaggtggcggaggcgaggcactgcctgtcgcagagccaccggttcaagggcctgtgcatgagcagcaacaactgcgccaacgtgtgccagaccgagaacttccccggcggcgagtgcaaggcggagggcgccacgcgcaagtgcttctgcaagaagatatgcacttttgataagccaccaccaggattaacaccacctggtaggcactgcctgtcgcagagccaccggttcaagggcctgtgcatgagcagcaacaactgcgccaacgtgtgccagaccgagaacttccccggcggcgagtgcaaggcggagggcgccacgcgcaagtgcttctgcaagaagatatgctag

SEQ ID NO: 215 - DNA, 420 bp, Artificial Sequence
  chimeric material
atggcgctgtctcgccgcatgggcgctcccgtcctcatccttgtgctcctcctcgtcgccacagagctggggacgaccaaggtggcggaggcgaggcactgcctgtcgcagagccaccggttcaagggcctgtgcatgagcagcaacaactgcgccaacgtgtgccagaccgagaacttccccggcggcgagtgcaaggcggagggcgccacgcgcaagtgcttctgcaagaagatatgcggagggaaggcaggtaaaaaagcaccaaaaaggcactgcctgtcgcagagccaccggttcaagggcctgtgcatgagcagcaacaactgcgccaacgtgtgccagaccgagaacttccccggcggcgagtgcaaggcggagggcgccacgcgcaagtgcttctgcaagaagatatgctag

SEQ ID NO: 216 - DNA, 426 bp, Artificial Sequence
  chimeric material
atggcgctgtctcgccgcatgggcgctcccgtcctcatccttgtgctcctcctcgtcgccacagagctggggacgaccaaggtggcggaggcgaggcactgcctgtcgcagagccaccggttcaagggcctgtgcatgagcagcaacaactgcgccaacgtgtgccagaccgagaacttccccggcggcgagtgcaaggcggagggcgccacgcgcaagtgcttctgcaagaagatatgcggagggaaggcaggtaaaaaagcaccaaaaagggataggcactgcctgtcgcagagccaccggttcaagggcctgtgcatgagcagcaacaactgcgccaacgtgtgccagaccgagaacttccccggcggcgagtgcaaggcggagggcgccacgcgcaagtgcttctgcaagaagatatgctag

SEQ ID NO: 217 - DNA, 417 bp, Artificial Sequence
  chimeric material
atggcgctgtctcgccgcatgggcgctcccgtcctcatccttgtgctcctcctcgtcgccacagagctggggacgaccaaggtggcggaggcgaggcactgcctgtcgcagagccaccggttcaagggcctgtgcatgagcagcaacaactgcgccaacgtgtgccagaccgagaacttccccggcggcgagtgcaaggcggagggcgccacgcgcaagtgcttctgcaagaagatatgcggagggaagccaggtaaaaaagcaccaaggcactgcctgtcgcagagccaccggttcaagggcctgtgcatgagcagcaacaactgcgccaacgtgtgccagaccgagaacttccccggcggcgagtgcaaggcggagggcgccacgcgcaagtgcttctgcaagaagatatgctag

SEQ ID NO: 218 - DNA, 432 bp, Artificial Sequence
  chimeric material
atggcgctgtctcgccgcatgggcgctcccgtcctcatccttgtgctcctcctcgtcgccacagagctggggacgaccaaggtggcggaggcgaggcactgcctgtcgcagagccaccggttcaagggcctgtgcatgagcagcaacaactgcgccaacgtgtgccagaccgagaacttccccggcggcgagtgcaaggcggagggcgccacgcgcaagtgcttctgcaagaagatatgcttttacaatacgccacccccaaaaactcgaggaatacgaactaggcactgcctgtcgcagagccaccggttcaagggcctgtgcatgagcagcaacaactgcgccaacgtgtgccagaccgagaacttccccggcggcgagtgcaaggcggagggcgccacgcgcaagtgcttctgcaagaagatatgctag

SEQ ID NO: 219 - DNA, 420 bp, Artificial Sequence
  chimeric material
atggcgctgtctcgccgcatgggcgctcccgtcctcatccttgtgctcctcctcgtcgccacagagctggggacgaccaaggtggcggaggcgaggcactgcctgtcgcagagccaccggttcaagggcctgtgcatgagcagcaacaactgcgccaacgtgtgccagaccgagaacttccccggcggcgagtgcaaggcggagggcgccacgcgcaagtgcttctgcaagaagatatgcggagggaaggcaggtaaagatcaaataacaaggcactgcctgtcgcagagccaccggttcaagggcctgtgcatgagcagcaacaactgcgccaacgtgtgccagaccgagaacttccccggcggcgagtgcaaggcggagggcgccacgcgcaagtgcttctgcaagaagatatgctag

SEQ ID NO: 220 - DNA, 393 bp, Artificial Sequence
  chimeric material
atggctcgttcagttcctttggtttccaccatctttgtcttccttctgcttcttgtggccactgggccaagtatggtggcagaagcaagaacttgtgagtcacaaagtcacaaattcaaagggccatgtgctagtgatcacaactgtgcttctgtgtgccaaacagaacgtttctctggaggacgctgccgtggattccgtcgtagatgcttttgcactacacattgtgcgtcatttaaaccagccaaaagaacttgtgagtcacaaagtcacaaattcaaagggccatgtgctagtgatcacaactgtgcttctgtgtgccaaacagaacgtttctctggaggacgctgccgtggattccgtcgtagatgcttttgcactacacattgttaa

SEQ ID NO: 221 - DNA, 402 bp, Artificial Sequence
  chimeric material
atggctcgttcagttcctttggtttccaccatctttgtcttccttctgcttcttgtggccactgggccaagtatggtggcagaagcaagaacttgtgagtcacaaagtcacaaattcaaagggccatgtgctagtgatcacaactgtgcttctgtgtgccaaacagaacgtttctctggaggacgctgccgtggattccgtcgtagatgcttttgcactacacattgtgcaaccccaccgactccgactccacccaagagaacttgtgagtcacaaagtcacaaattcaaagggccatgtgctagtgatcacaactgtgcttctgtgtgccaaacagaacgtttctctggaggacgctgccgtggattccgtcgtagatgcttttgcactacacattgttaa

SEQ ID NO: 222 - DNA, 408 bp, Artificial Sequence
  chimeric material
atggctcgttcagttcctttggtttccaccatctttgtcttccttctgcttcttgtggccactgggccaagtatggtggcagaagcaagaacttgtgagtcacaaagtcacaaattcaaagggccatgtgctagtgatcacaactgtgcttctgtgtgccaaacagaacgtttctctggaggacgctgccgtggattccgtcgtagatgcttttgcactacacattgtactcctcctacacctccgtcgcccccgacacggcccagaacttgtgagtcacaaagtcacaaattcaaagggccatgtgctagtgatcacaactgtgcttctgtgtgccaaacagaacgtttctctggaggacgctgccgtggattccgtcgtagatgcttttgcactacacattgttaa

SEQ ID NO: 223 - DNA, 405 bp, Artificial Sequence
  chimeric material
atggctcgttcagttcctttggtttccaccatctttgtcttccttctgcttcttgtggccactgggccaagtatggtggcagaagcaagaacttgtgagtcacaaagtcacaaattcaaagggccatgtgctagtgatcacaactgtgcttctgtgtgccaaacagaacgtttctctggaggacgctgccgtggattccgtcgtagatgcttttgcactacacattgtggaccgccatcaccaactcctccacatcacaaaagaacttgtgagtcacaaagtcacaaattcaaagggccatgtgctagtgatcacaactgtgcttctgtgtgccaaacagaacgtttctctggaggacgctgccgtggattccgtcgtagatgcttttgcactacacattgttaa

SEQ ID NO: 224 - DNA, 399 bp, Artificial Sequence
  chimeric material
atggctcgttcagttcctttggtttccaccatctttgtcttccttctgcttcttgtggccactgggccaagtatggtggcagaagcaagaacttgtgagtcacaaagtcacaaattcaaagggccatgtgctagtgatcacaactgtgcttctgtgtgccaaacagaacgtttctctggaggacgctgccgtggattccgtcgtagatgcttttgcactacacattgtgaaccaccctcgctgactccactcaatagaacttgtgagtcacaaagtcacaaattcaaagggccatgtgctagtgatcacaactgtgcttctgtgtgccaaacagaacgtttctctggaggacgctgccgtggattccgtcgtagatgcttttgcactacacattgttaa

SEQ ID NO: 225 - DNA, 405 bp, Artificial Sequence
  chimeric material
atggctcgttcagttcctttggtttccaccatctttgtcttccttctgcttcttgtggccactgggccaagtatggtggcagaagcaagaacttgtgagtcacaaagtcacaaattcaaagggccatgtgctagtgatcacaactgtgcttctgtgtgccaaacagaacgtttctctggaggacgctgccgtggattccgtcgtagatgcttttgcactacacattgtgaaccaccctcgctgacgtcgactccactcaatagaacttgtgagtcacaaagtcacaaattcaaagggccatgtgctagtgatcacaactgtgcttctgtgtgccaaacagaacgtttctctggaggacgctgccgtggattccgtcgtagatgcttttgcactacacattgttaa

SEQ ID NO: 226 - DNA, 402 bp, Artificial Sequence
  chimeric material
atggctcgttcagttcctttggtttccaccatctttgtcttccttctgcttcttgtggccactgggccaagtatggtggcagaagcaagaacttgtgagtcacaaagtcacaaattcaaagggccatgtgctagtgatcacaactgtgcttctgtgtgccaaacagaacgtttctctggaggacgctgccgtggattccgtcgtagatgcttttgcactacacattgtaacaacgagagtgcatcaccagcgtccaaaagaacttgtgagtcacaaagtcacaaattcaaagggccatgtgctagtgatcacaactgtgcttctgtgtgccaaacagaacgtttctctggaggacgctgccgtggattccgtcgtagatgcttttgcactacacattgttaa

SEQ ID NO: 227 - DNA, 393 bp, Artificial Sequence
  chimeric material
atggctcgttcagttcctttggtttccaccatctttgtcttccttctgcttcttgtggccactgggccaagtatggtggcagaagcaagaacttgtgagtcacaaagtcacaaattcaaagggccatgtgctagtgatcacaactgtgcttctgtgtgccaaacagaacgtttctctggaggacgctgccgtggattccgtcgtagatgcttttgcactacacattgtgctggtcgtggtgataaaaaaagaacttgtgagtcacaaagtcacaaattcaaagggccatgtgctagtgatcacaactgtgcttctgtgtgccaaacagaacgtttctctggaggacgctgccgtggattccgtcgtagatgcttttgcactacacattgttaa

SEQ ID NO: 228 - DNA, 405 bp, Artificial Sequence
  chimeric material
atggctcgttcagttcctttggtttccaccatctttgtcttccttctgcttcttgtggccactgggccaagtatggtggcagaagcaagaacttgtgagtcacaaagtcacaaattcaaagggccatgtgctagtgatcacaactgtgcttctgtgtgccaaacagaacgtttctctggaggacgctgccgtggattccgtcgtagatgcttttgcactacacattgtggctctccgtcgaaacggccgccatcgcccaaaagaacttgtgagtcacaaagtcacaaattcaaagggccatgtgctagtgatcacaactgtgcttctgtgtgccaaacagaacgtttctctggaggacgctgccgtggattccgtcgtagatgcttttgcactacacattgttaa

SEQ ID NO: 229 - DNA, 402 bp, Artificial Sequence
  chimeric material
atggctcgttcagttcctttggtttccaccatctttgtcttccttctgcttcttgtggccactgggccaagtatggtggcagaagcaagaacttgtgagtcacaaagtcacaaattcaaagggccatgtgctagtgatcacaactgtgcttctgtgtgccaaacagaacgtttctctggaggacgctgccgtggattccgtcgtagatgcttttgcactacacattgtggacctccatcgccgccgccatactcgaaaagaacttgtgagtcacaaagtcacaaattcaaagggccatgtgctagtgatcacaactgtgcttctgtgtgccaaacagaacgtttctctggaggacgctgccgtggattccgtcgtagatgcttttgcactacacattgttaa

SEQ ID NO: 230 - DNA, 393 bp, Artificial Sequence
  chimeric material
atggctcgttcagttcctttggtttccaccatctttgtcttccttctgcttcttgtggccactgggccaagtatggtggcagaagcaagaacttgtgagtcacaaagtcacaaattcaaagggccatgtgctagtgatcacaactgtgcttctgtgtgccaaacagaacgtttctctggaggacgctgccgtggattccgtcgtagatgcttttgcactacacattgtgctccaaagaaggtggaacctagaacttgtgagtcacaaagtcacaaattcaaagggccatgtgctagtgatcacaactgtgcttctgtgtgccaaacagaacgtttctctggaggacgctgccgtggattccgtcgtagatgcttttgcactacacattgttaa

SEQ ID NO: 231 - DNA, 411 bp, Artificial Sequence
  chimeric material
atggctcgttcagttcctttggtttccaccatctttgtcttccttctgcttcttgtggccactgggccaagtatggtggcagaagcaagaacttgtgagtcacaaagtcacaaattcaaagggccatgtgctagtgatcacaactgtgcttctgtgtgccaaacagaacgtttctctggaggacgctgccgtggattccgtcgtagatgcttttgcactacacattgtacttttgataagccaccaccaggattaacaccacctggtagaacttgtgagtcacaaagtcacaaattcaaagggccatgtgctagtgatcacaactgtgcttctgtgtgccaaacagaacgtttctctggaggacgctgccgtggattccgtcgtagatgcttttgcactacacattgttaa

SEQ ID NO: 232 - DNA, 402 bp, Artificial Sequence
  chimeric material
atggctcgttcagttcctttggtttccaccatctttgtcttccttctgcttcttgtggccactgggccaagtatggtggcagaagcaagaacttgtgagtcacaaagtcacaaattcaaagggccatgtgctagtgatcacaactgtgcttctgtgtgccaaacagaacgtttctctggaggacgctgccgtggattccgtcgtagatgcttttgcactacacattgtggagggaaggcaggtaaaaaagcaccaaaaagaacttgtgagtcacaaagtcacaaattcaaagggccatgtgctagtgatcacaactgtgcttctgtgtgccaaacagaacgtttctctggaggacgctgccgtggattccgtcgtagatgcttttgcactacacattgttaa

SEQ ID NO: 233 - DNA, 408 bp, Artificial Sequence
  chimeric material
atggctcgttcagttcctttggtttccaccatctttgtcttccttctgcttcttgtggccactgggccaagtatggtggcagaagcaagaacttgtgagtcacaaagtcacaaattcaaagggccatgtgctagtgatcacaactgtgcttctgtgtgccaaacagaacgtttctctggaggacgctgccgtggattccgtcgtagatgcttttgcactacacattgtggagggaaggcaggtaaaaaagcaccaaaaagggatagaacttgtgagtcacaaagtcacaaattcaaagggccatgtgctagtgatcacaactgtgcttctgtgtgccaaacagaacgtttctctggaggacgctgccgtggattccgtcgtagatgcttttgcactacacattgttaa

SEQ ID NO: 234 - DNA, 399 bp, Artificial Sequence
  chimeric material
atggctcgttcagttcctttggtttccaccatctttgtcttccttctgcttcttgtggccactgggccaagtatggtggcagaagcaagaacttgtgagtcacaaagtcacaaattcaaagggccatgtgctagtgatcacaactgtgcttctgtgtgccaaacagaacgtttctctggaggacgctgccgtggattccgtcgtagatgcttttgcactacacattgtggagggaagccaggtaaaaaagcaccaagaacttgtgagtcacaaagtcacaaattcaaagggccatgtgctagtgatcacaactgtgcttctgtgtgccaaacagaacgtttctctggaggacgctgccgtggattccgtcgtagatgcttttgcactacacattgttaa

SEQ ID NO: 235 - DNA, 414 bp, Artificial Sequence
  chimeric material
atggctcgttcagttcctttggtttccaccatctttgtcttccttctgcttcttgtggccactgggccaagtatggtggcagaagcaagaacttgtgagtcacaaagtcacaaattcaaagggccatgtgctagtgatcacaactgtgcttctgtgtgccaaacagaacgtttctctggaggacgctgccgtggattccgtcgtagatgcttttgcactacacattgtttttacaatacgccacccccaaaaactcgaggaatacgaactagaacttgtgagtcacaaagtcacaaattcaaagggccatgtgctagtgatcacaactgtgcttctgtgtgccaaacagaacgtttctctggaggacgctgccgtggattccgtcgtagatgcttttgcactacacattgttaa

SEQ ID NO: 236 - DNA, 402 bp, Artificial Sequence
  chimeric material
atggctcgttcagttcctttggtttccaccatctttgtcttccttctgcttcttgtggccactgggccaagtatggtggcagaagcaagaacttgtgagtcacaaagtcacaaattcaaagggccatgtgctagtgatcacaactgtgcttctgtgtgccaaacagaacgtttctctggaggacgctgccgtggattccgtcgtagatgcttttgcactacacattgtggagggaaggcaggtaaagatcaaataacaagaacttgtgagtcacaaagtcacaaattcaaagggccatgtgctagtgatcacaactgtgcttctgtgtgccaaacagaacgtttctctggaggacgctgccgtggattccgtcgtagatgcttttgcactacacattgttaa

SEQ ID NO: 237 - DNA, 318 bp, Artificial Sequence
  chimeric material
aggcactgcctgtcgcagagccaccggttcaagggcctgtgcatgagcagcaacaactgcgccaacgtgtgccagaccgagaacttccccggcggcgagtgcaaggcggagggcgccacgcgcaagtgcttctgcaagaagatatgcgcgtcatttaaaccagccaaaaggcactgcctgtcgcagagccaccggttcaagggcctgtgcatgagcagcaacaactgcgccaacgtgtgccagaccgagaacttccccggcggcgagtgcaaggcggagggcgccacgcgcaagtgcttctgcaagaagatatgctag

SEQ ID NO: 238 - DNA, 327 bp, Artificial Sequence
  chimeric material
aggcactgcctgtcgcagagccaccggttcaagggcctgtgcatgagcagcaacaactgcgccaacgtgtgccagaccgagaacttccccggcggcgagtgcaaggcggagggcgccacgcgcaagtgcttctgcaagaagatatgcgcaaccccaccgactccgactccacccaagaggcactgcctgtcgcagagccaccggttcaagggcctgtgcatgagcagcaacaactgcgccaacgtgtgccagaccgagaacttccccggcggcgagtgcaaggcggagggcgccacgcgcaagtgcttctgcaagaagatatgctag

SEQ ID NO: 239 - DNA, 333 bp, Artificial Sequence
  chimeric material
aggcactgcctgtcgcagagccaccggttcaagggcctgtgcatgagcagcaacaactgcgccaacgtgtgccagaccgagaacttccccggcggcgagtgcaaggcggagggcgccacgcgcaagtgcttctgcaagaagatatgcactcctcctacacctccgtcgcccccgacacggcccaggcactgcctgtcgcagagccaccggttcaagggcctgtgcatgagcagcaacaactgcgccaacgtgtgccagaccgagaacttccccggcggcgagtgcaaggcggagggcgccacgcgcaagtgcttctgcaagaagatatgctag

SEQ ID NO: 240 - DNA, 330 bp, Artificial Sequence
  chimeric material
aggcactgcctgtcgcagagccaccggttcaagggcctgtgcatgagcagcaacaactgcgccaacgtgtgccagaccgagaacttccccggcggcgagtgcaaggcggagggcgccacgcgcaagtgcttctgcaagaagatatgcggaccgccatcaccaactcctccacatcacaaaaggcactgcctgtcgcagagccaccggttcaagggcctgtgcatgagcagcaacaactgcgccaacgtgtgccagaccgagaacttccccggcggcgagtgcaaggcggagggcgccacgcgcaagtgcttctgcaagaagatatgctag

SEQ ID NO: 241 - DNA, 324 bp, Artificial Sequence
  chimeric material
aggcactgcctgtcgcagagccaccggttcaagggcctgtgcatgagcagcaacaactgcgccaacgtgtgccagaccgagaacttccccggcggcgagtgcaaggcggagggcgccacgcgcaagtgcttctgcaagaagatatgcgaaccaccctcgctgactccactcaataggcactgcctgtcgcagagccaccggttcaagggcctgtgcatgagcagcaacaactgcgccaacgtgtgccagaccgagaacttccccggcggcgagtgcaaggcggagggcgccacgcgcaagtgcttctgcaagaagatatgctag

SEQ ID NO: 242 - DNA, 330 bp, Artificial Sequence
  chimeric material
aggcactgcctgtcgcagagccaccggttcaagggcctgtgcatgagcagcaacaactgcgccaacgtgtgccagaccgagaacttccccggcggcgagtgcaaggcggagggcgccacgcgcaagtgcttctgcaagaagatatgcgaaccaccctcgctgacgtcgactccactcaataggcactgcctgtcgcagagccaccggttcaagggcctgtgcatgagcagcaacaactgcgccaacgtgtgccagaccgagaacttccccggcggcgagtgcaaggcggagggcgccacgcgcaagtgcttctgcaagaagatatgctag

SEQ ID NO: 243 - DNA, 327 bp, Artificial Sequence
  chimeric material
aggcactgcctgtcgcagagccaccggttcaagggcctgtgcatgagcagcaacaactgcgccaacgtgtgccagaccgagaacttccccggcggcgagtgcaaggcggagggcgccacgcgcaagtgcttctgcaagaagatatgcaacaacgagagtgcatcaccagcgtccaaaaggcactgcctgtcgcagagccaccggttcaagggcctgtgcatgagcagcaacaactgcgccaacgtgtgccagaccgagaacttccccggcggcgagtgcaaggcggagggcgccacgcgcaagtgcttctgcaagaagatatgctag

SEQ ID NO: 244 - DNA, 318 bp, Artificial Sequence
  chimeric material
aggcactgcctgtcgcagagccaccggttcaagggcctgtgcatgagcagcaacaactgcgccaacgtgtgccagaccgagaacttccccggcggcgagtgcaaggcggagggcgccacgcgcaagtgcttctgcaagaagatatgcgctggtcgtggtgataaaaaaaggcactgcctgtcgcagagccaccggttcaagggcctgtgcatgagcagcaacaactgcgccaacgtgtgccagaccgagaacttccccggcggcgagtgcaaggcggagggcgccacgcgcaagtgcttctgcaagaagatatgctag

SEQ ID NO: 245 - DNA, 330 bp, Artificial Sequence
  chimeric material
aggcactgcctgtcgcagagccaccggttcaagggcctgtgcatgagcagcaacaactgcgccaacgtgtgccagaccgagaacttccccggcggcgagtgcaaggcggagggcgccacgcgcaagtgcttctgcaagaagatatgcggctctccgtcgaaacggccgccatcgcccaaaaggcactgcctgtcgcagagccaccggttcaagggcctgtgcatgagcagcaacaactgcgccaacgtgtgccagaccgagaacttccccggcggcgagtgcaaggcggagggcgccacgcgcaagtgcttctgcaagaagatatgctag

SEQ ID NO: 246 - DNA, 327 bp, Artificial Sequence
  chimeric material
aggcactgcctgtcgcagagccaccggttcaagggcctgtgcatgagcagcaacaactgcgccaacgtgtgccagaccgagaacttccccggcggcgagtgcaaggcggagggcgccacgcgcaagtgcttctgcaagaagatatgcggacctccatcgccgccgccatactcgaaaaggcactgcctgtcgcagagccaccggttcaagggcctgtgcatgagcagcaacaactgcgccaacgtgtgccagaccgagaacttccccggcggcgagtgcaaggcggagggcgccacgcgcaagtgcttctgcaagaagatatgctag

SEQ ID NO: 247 - DNA, 318 bp, Artificial Sequence
  chimeric material
aggcactgcctgtcgcagagccaccggttcaagggcctgtgcatgagcagcaacaactgcgccaacgtgtgccagaccgagaacttccccggcggcgagtgcaaggcggagggcgccacgcgcaagtgcttctgcaagaagatatgcgctccaaagaaggtggaacctaggcactgcctgtcgcagagccaccggttcaagggcctgtgcatgagcagcaacaactgcgccaacgtgtgccagaccgagaacttccccggcggcgagtgcaaggcggagggcgccacgcgcaagtgcttctgcaagaagatatgctag

SEQ ID NO: 248 - DNA, 336 bp, Artificial Sequence
  chimeric material
aggcactgcctgtcgcagagccaccggttcaagggcctgtgcatgagcagcaacaactgcgccaacgtgtgccagaccgagaacttccccggcggcgagtgcaaggcggagggcgccacgcgcaagtgcttctgcaagaagatatgcacttttgataagccaccaccaggattaacaccacctggtaggcactgcctgtcgcagagccaccggttcaagggcctgtgcatgagcagcaacaactgcgccaacgtgtgccagaccgagaacttccccggcggcgagtgcaaggcggagggcgccacgcgcaagtgcttctgcaagaagatatgctag

SEQ ID NO: 249 - DNA, 327 bp, Artificial Sequence
  chimeric material
aggcactgcctgtcgcagagccaccggttcaagggcctgtgcatgagcagcaacaactgcgccaacgtgtgccagaccgagaacttccccggcggcgagtgcaaggcggagggcgccacgcgcaagtgcttctgcaagaagatatgcggagggaaggcaggtaaaaaagcaccaaaaaggcactgcctgtcgcagagccaccggttcaagggcctgtgcatgagcagcaacaactgcgccaacgtgtgccagaccgagaacttccccggcggcgagtgcaaggcggagggcgccacgcgcaagtgcttctgcaagaagatatgctag

SEQ ID NO: 250 - DNA, 333 bp, Artificial Sequence
  chimeric material
aggcactgcctgtcgcagagccaccggttcaagggcctgtgcatgagcagcaacaactgcgccaacgtgtgccagaccgagaacttccccggcggcgagtgcaaggcggagggcgccacgcgcaagtgcttctgcaagaagatatgcggagggaaggcaggtaaaaaagcaccaaaaagggataggcactgcctgtcgcagagccaccggttcaagggcctgtgcatgagcagcaacaactgcgccaacgtgtgccagaccgagaacttccccggcggcgagtgcaaggcggagggcgccacgcgcaagtgcttctgcaagaagatatgctag

SEQ ID NO: 251 - DNA, 324 bp, Artificial Sequence
  chimeric material
aggcactgcctgtcgcagagccaccggttcaagggcctgtgcatgagcagcaacaactgcgccaacgtgtgccagaccgagaacttccccggcggcgagtgcaaggcggagggcgccacgcgcaagtgcttctgcaagaagatatgcggagggaagccaggtaaaaaagcaccaaggcactgcctgtcgcagagccaccggttcaagggcctgtgcatgagcagcaacaactgcgccaacgtgtgccagaccgagaacttccccggcggcgagtgcaaggcggagggcgccacgcgcaagtgcttctgcaagaagatatgctag

SEQ ID NO: 252 - DNA, 339 bp, Artificial Sequence
  chimeric material
aggcactgcctgtcgcagagccaccggttcaagggcctgtgcatgagcagcaacaactgcgccaacgtgtgccagaccgagaacttccccggcggcgagtgcaaggcggagggcgccacgcgcaagtgcttctgcaagaagatatgcttttacaatacgccacccccaaaaactcgaggaatacgaactaggcactgcctgtcgcagagccaccggttcaagggcctgtgcatgagcagcaacaactgcgccaacgtgtgccagaccgagaacttccccggcggcgagtgcaaggcggagggcgccacgcgcaagtgcttctgcaagaagatatgctag

SEQ ID NO: 253 - DNA, 327 bp, Artificial Sequence
  chimeric material
aggcactgcctgtcgcagagccaccggttcaagggcctgtgcatgagcagcaacaactgcgccaacgtgtgccagaccgagaacttccccggcggcgagtgcaaggcggagggcgccacgcgcaagtgcttctgcaagaagatatgcggagggaaggcaggtaaagatcaaataacaaggcactgcctgtcgcagagccaccggttcaagggcctgtgcatgagcagcaacaactgcgccaacgtgtgccagaccgagaacttccccggcggcgagtgcaaggcggagggcgccacgcgcaagtgcttctgcaagaagatatgctag

SEQ ID NO: 254 - DNA, 306 bp, Artificial Sequence
  chimeric material
cgcacttgcgagagccagtctcacaagttcaagggcccatgcgcgtcggaccacaactgcgcgtcagtctgtcagactgagcgcttcagtggtgggcgctgccggggattccgccgtcggtgcttttgcacgacacattgtgcgtcatttaaaccagccaaacgcacttgcgagagccagtctcacaagttcaagggcccatgcgcgtcggaccacaactgcgcgtcagtctgtcagactgagcgcttcagtggtgggcgctgccggggattccgccgtcggtgcttttgcacgacacattgttag

SEQ ID NO: 255 - DNA, 315 bp, Artificial Sequence
  chimeric material
cgcacttgcgagagccagtctcacaagttcaagggcccatgcgcgtcggaccacaactgcgcgtcagtctgtcagactgagcgcttcagtggtgggcgctgccggggattccgccgtcggtgcttttgcacgacacattgtgcaaccccaccgactccgactccacccaagcgcacttgcgagagccagtctcacaagttcaagggcccatgcgcgtcggaccacaactgcgcgtcagtctgtcagactgagcgcttcagtggtgggcgctgccggggattccgccgtcggtgcttttgcacgacacattgttag

SEQ ID NO: 256 - DNA, 321 bp, Artificial Sequence
  chimeric material
cgcacttgcgagagccagtctcacaagttcaagggcccatgcgcgtcggaccacaactgcgcgtcagtctgtcagactgagcgcttcagtggtgggcgctgccggggattccgccgtcggtgcttttgcacgacacattgtactcctcctacacctccgtcgcccccgacacggccccgcacttgcgagagccagtctcacaagttcaagggcccatgcgcgtcggaccacaactgcgcgtcagtctgtcagactgagcgcttcagtggtgggcgctgccggggattccgccgtcggtgcttttgcacgacacattgttag

SEQ ID NO: 257 - DNA, 318 bp, Artificial Sequence
  chimeric material
cgcacttgcgagagccagtctcacaagttcaagggcccatgcgcgtcggaccacaactgcgcgtcagtctgtcagactgagcgcttcagtggtgggcgctgccggggattccgccgtcggtgcttttgcacgacacattgtggaccgccatcaccaactcctccacatcacaaacgcacttgcgagagccagtctcacaagttcaagggcccatgcgcgtcggaccacaactgcgcgtcagtctgtcagactgagcgcttcagtggtgggcgctgccggggattccgccgtcggtgcttttgcacgacacattgttag

SEQ ID NO: 258 - DNA, 312 bp, Artificial Sequence
  chimeric material
cgcacttgcgagagccagtctcacaagttcaagggcccatgcgcgtcggaccacaactgcgcgtcagtctgtcagactgagcgcttcagtggtgggcgctgccggggattccgccgtcggtgcttttgcacgacacattgtgaaccaccctcgctgactccactcaatcgcacttgcgagagccagtctcacaagttcaagggcccatgcgcgtcggaccacaactgcgcgtcagtctgtcagactgagcgcttcagtggtgggcgctgccggggattccgccgtcggtgcttttgcacgacacattgttag

SEQ ID NO: 259 - DNA, 318 bp, Artificial Sequence
  chimeric material
cgcacttgcgagagccagtctcacaagttcaagggcccatgcgcgtcggaccacaactgcgcgtcagtctgtcagactgagcgcttcagtggtgggcgctgccggggattccgccgtcggtgcttttgcacgacacattgtgaaccaccctcgctgacgtcgactccactcaatcgcacttgcgagagccagtctcacaagttcaagggcccatgcgcgtcggaccacaactgcgcgtcagtctgtcagactgagcgcttcagtggtgggcgctgccggggattccgccgtcggtgcttttgcacgacacattgttag

SEQ ID NO: 260 - DNA, 315 bp, Artificial Sequence
  chimeric material
cgcacttgcgagagccagtctcacaagttcaagggcccatgcgcgtcggaccacaactgcgcgtcagtctgtcagactgagcgcttcagtggtgggcgctgccggggattccgccgtcggtgcttttgcacgacacattgtaacaacgagagtgcatcaccagcgtccaaacgcacttgcgagagccagtctcacaagttcaagggcccatgcgcgtcggaccacaactgcgcgtcagtctgtcagactgagcgcttcagtggtgggcgctgccggggattccgccgtcggtgcttttgcacgacacattgttag

SEQ ID NO: 261 - DNA, 306 bp, Artificial Sequence
  chimeric material
cgcacttgcgagagccagtctcacaagttcaagggcccatgcgcgtcggaccacaactgcgcgtcagtctgtcagactgagcgcttcagtggtgggcgctgccggggattccgccgtcggtgcttttgcacgacacattgtgctggtcgtggtgataaaaaacgcacttgcgagagccagtctcacaagttcaagggcccatgcgcgtcggaccacaactgcgcgtcagtctgtcagactgagcgcttcagtggtgggcgctgccggggattccgccgtcggtgcttttgcacgacacattgttag

SEQ ID NO: 262 - DNA, 318 bp, Artificial Sequence
  chimeric material
cgcacttgcgagagccagtctcacaagttcaagggcccatgcgcgtcggaccacaactgcgcgtcagtctgtcagactgagcgcttcagtggtgggcgctgccggggattccgccgtcggtgcttttgcacgacacattgtggctctccgtcgaaacggccgccatcgcccaaacgcacttgcgagagccagtctcacaagttcaagggcccatgcgcgtcggaccacaactgcgcgtcagtctgtcagactgagcgcttcagtggtgggcgctgccggggattccgccgtcggtgcttttgcacgacacattgttag

SEQ ID NO: 263 - DNA, 315 bp, Artificial Sequence
  chimeric material
cgcacttgcgagagccagtctcacaagttcaagggcccatgcgcgtcggaccacaactgcgcgtcagtctgtcagactgagcgcttcagtggtgggcgctgccggggattccgccgtcggtgcttttgcacgacacattgtggacctccatcgccgccgccatactcgaaacgcacttgcgagagccagtctcacaagttcaagggcccatgcgcgtcggaccacaactgcgcgtcagtctgtcagactgagcgcttcagtggtgggcgctgccggggattccgccgtcggtgcttttgcacgacacattgttag

SEQ ID NO: 264 - DNA, 306 bp, Artificial Sequence
  chimeric material
cgcacttgcgagagccagtctcacaagttcaagggcccatgcgcgtcggaccacaactgcgcgtcagtctgtcagactgagcgcttcagtggtgggcgctgccggggattccgccgtcggtgcttttgcacgacacattgtgctccaaagaaggtggaacctcgcacttgcgagagccagtctcacaagttcaagggcccatgcgcgtcggaccacaactgcgcgtcagtctgtcagactgagcgcttcagtggtgggcgctgccggggattccgccgtcggtgcttttgcacgacacattgttag

SEQ ID NO: 265 - DNA, 324 bp, Artificial Sequence
  chimeric material
cgcacttgcgagagccagtctcacaagttcaagggcccatgcgcgtcggaccacaactgcgcgtcagtctgtcagactgagcgcttcagtggtgggcgctgccggggattccgccgtcggtgcttttgcacgacacattgtacttttgataagccaccaccaggattaacaccacctggtcgcacttgcgagagccagtctcacaagttcaagggcccatgcgcgtcggaccacaactgcgcgtcagtctgtcagactgagcgcttcagtggtgggcgctgccggggattccgccgtcggtgcttttgcacgacacattgttag

SEQ ID NO: 266 - DNA, 315 bp, Artificial Sequence
  chimeric material
cgcacttgcgagagccagtctcacaagttcaagggcccatgcgcgtcggaccacaactgcgcgtcagtctgtcagactgagcgcttcagtggtgggcgctgccggggattccgccgtcggtgcttttgcacgacacattgtggagggaaggcaggtaaaaaagcaccaaaacgcacttgcgagagccagtctcacaagttcaagggcccatgcgcgtcggaccacaactgcgcgtcagtctgtcagactgagcgcttcagtggtgggcgctgccggggattccgccgtcggtgcttttgcacgacacattgttag

SEQ ID NO: 267 - DNA, 321 bp, Artificial Sequence
  chimeric material
cgcacttgcgagagccagtctcacaagttcaagggcccatgcgcgtcggaccacaactgcgcgtcagtctgtcagactgagcgcttcagtggtgggcgctgccggggattccgccgtcggtgcttttgcacgacacattgtggagggaaggcaggtaaaaaagcaccaaaaagggatcgcacttgcgagagccagtctcacaagttcaagggcccatgcgcgtcggaccacaactgcgcgtcagtctgtcagactgagcgcttcagtggtgggcgctgccggggattccgccgtcggtgcttttgcacgacacattgttag

SEQ ID NO: 268 - DNA, 312 bp, Artificial Sequence
  chimeric material
cgcacttgcgagagccagtctcacaagttcaagggcccatgcgcgtcggaccacaactgcgcgtcagtctgtcagactgagcgcttcagtggtgggcgctgccggggattccgccgtcggtgcttttgcacgacacattgtggagggaagccaggtaaaaaagcaccacgcacttgcgagagccagtctcacaagttcaagggcccatgcgcgtcggaccacaactgcgcgtcagtctgtcagactgagcgcttcagtggtgggcgctgccggggattccgccgtcggtgcttttgcacgacacattgttag

SEQ ID NO: 269 - DNA, 327 bp, Artificial Sequence
  chimeric material
cgcacttgcgagagccagtctcacaagttcaagggcccatgcgcgtcggaccacaactgcgcgtcagtctgtcagactgagcgcttcagtggtgggcgctgccggggattccgccgtcggtgcttttgcacgacacattgtttttacaatacgccacccccaaaaactcgaggaatacgaactcgcacttgcgagagccagtctcacaagttcaagggcccatgcgcgtcggaccacaactgcgcgtcagtctgtcagactgagcgcttcagtggtgggcgctgccggggattccgccgtcggtgcttttgcacgacacattgttag

SEQ ID NO: 270 - DNA, 315 bp, Artificial Sequence
  chimeric material
cgcacttgcgagagccagtctcacaagttcaagggcccatgcgcgtcggaccacaactgcgcgtcagtctgtcagactgagcgcttcagtggtgggcgctgccggggattccgccgtcggtgcttttgcacgacacattgtggagggaaggcaggtaaagatcaaataacacgcacttgcgagagccagtctcacaagttcaagggcccatgcgcgtcggaccacaactgcgcgtcagtctgtcagactgagcgcttcagtggtgggcgctgccggggattccgccgtcggtgcttttgcacgacacattgttag

SEQ ID NO: 271 - DNA, 288 bp, Artificial Sequence
  chimeric material
aactcatgccaagaccctctaggtagttgtctacaatgtgatgagagatgcaaggctaagcacgggccaacgggccaagcaagttgcgacagtcgaaaccaactatgcacgtgctattacacgtgcgcaaccccaccgactccgactccacccaagcaatgctacggtgggactggcttgtgcagcagtgcatgcaatcaaaactgtgcacaaaagtatcttggtggatctggattttgtgagagcattggcatctctagactgtgcaaatgccagtatccttgctga

SEQ ID NO: 272 - DNA, 294 bp, Artificial Sequence
  chimeric material
aactcatgccaagaccctctaggtagttgtctacaatgtgatgagagatgcaaggctaagcacgggccaacgggccaagcaagttgcgacagtcgaaaccaactatgcacgtgctattacacgtgcactcctcctacacctccgtcgcccccgacacggccccaatgctacggtgggactggcttgtgcagcagtgcatgcaatcaaaactgtgcacaaaagtatcttggtggatctggattttgtgagagcattggcatctctagactgtgcaaatgccagtatccttgctga

SEQ ID NO: 273 - DNA, 288 bp, Artificial Sequence
  chimeric material
aactcatgccaagaccctctaggtagttgtctacaatgtgatgagagatgcaaggctaagcacgggccaacgggccaagcaagttgcgacagtcgaaaccaactatgcacgtgctattacacgtgcggacctccatcgccgccgccatactcgaaacaatgctacggtgggactggcttgtgcagcagtgcatgcaatcaaaactgtgcacaaaagtatcttggtggatctggattttgtgagagcattggcatctctagactgtgcaaatgccagtatccttgctga

SEQ ID NO: 274 - DNA, 285 bp, Artificial Sequence
  chimeric material
aactcatgccaagaccctctaggtagttgtctacaatgtgatgagagatgcaaggctaagcacgggccaacgggccaagcaagttgcgacagtcgaaaccaactatgcacgtgctattacacgtgcgaaccaccctcgctgactccactcaatcaatgctacggtgggactggcttgtgcagcagtgcatgcaatcaaaactgtgcacaaaagtatcttggtggatctggattttgtgagagcattggcatctctagactgtgcaaatgccagtatccttgctga

SEQ ID NO: 275 - DNA, 291 bp, Artificial Sequence
  chimeric material
aactcatgccaagaccctctaggtagttgtctacaatgtgatgagagatgcaaggctaagcacgggccaacgggccaagcaagttgcgacagtcgaaaccaactatgcacgtgctattacacgtgcgaaccaccctcgctgacgtcgactccactcaatcaatgctacggtgggactggcttgtgcagcagtgcatgcaatcaaaactgtgcacaaaagtatcttggtggatctggattttgtgagagcattggcatctctagactgtgcaaatgccagtatccttgctga

SEQ ID NO: 276 - DNA, 297 bp, Artificial Sequence
  chimeric material
aactcatgccaagaccctctaggtagttgtctacaatgtgatgagagatgcaaggctaagcacgggccaacgggccaagcaagttgcgacagtcgaaaccaactatgcacgtgctattacacgtgcacttttgataagccaccaccaggattaacaccacctggtcaatgctacggtgggactggcttgtgcagcagtgcatgcaatcaaaactgtgcacaaaagtatcttggtggatctggattttgtgagagcattggcatctctagactgtgcaaatgccagtatccttgctga

SEQ ID NO: 277 - DNA, 300 bp, Artificial Sequence
  chimeric material
aactcatgccaagaccctctaggtagttgtctacaatgtgatgagagatgcaaggctaagcacgggccaacgggccaagcaagttgcgacagtcgaaaccaactatgcacgtgctattacacgtgcttttacaatacgccacccccaaaaactcgaggaatacgaactcaatgctacggtgggactggcttgtgcagcagtgcatgcaatcaaaactgtgcacaaaagtatcttggtggatctggattttgtgagagcattggcatctctagactgtgcaaatgccagtatccttgctga

SEQ ID NO: 278 - DNA, 291 bp, Artificial Sequence
  chimeric material
aactcatgccaagaccctctaggtagttgtctacaatgtgatgagagatgcaaggctaagcacgggccaacgggccaagcaagttgcgacagtcgaaaccaactatgcacgtgctattacacgtgcggctctccgtcgaaacggccgccatcgcccaaacaatgctacggtgggactggcttgtgcagcagtgcatgcaatcaaaactgtgcacaaaagtatcttggtggatctggattttgtgagagcattggcatctctagactgtgcaaatgccagtatccttgctga

SEQ ID NO: 279 - DNA, 279 bp, Artificial Sequence
  chimeric material
aactcatgccaagaccctctaggtagttgtctacaatgtgatgagagatgcaaggctaagcacgggccaacgggccaagcaagttgcgacagtcgaaaccaactatgcacgtgctattacacgtgcgctccaaagaaggtggaacctcaatgctacggtgggactggcttgtgcagcagtgcatgcaatcaaaactgtgcacaaaagtatcttggtggatctggattttgtgagagcattggcatctctagactgtgcaaatgccagtatccttgctga

SEQ ID NO: 280 - DNA, 294 bp, Artificial Sequence
  chimeric material
aactcatgccaagaccctctaggtagttgtctacaatgtgatgagagatgcaaggctaagcacgggccaacgggccaagcaagttgcgacagtcgaaaccaactatgcacgtgctattacacgtgcggagggaaggcaggtaaaaaagcaccaaaaagggatcaatgctacggtgggactggcttgtgcagcagtgcatgcaatcaaaactgtgcacaaaagtatcttggtggatctggattttgtgagagcattggcatctctagactgtgcaaatgccagtatccttgctga

SEQ ID NO: 281 - DNA, 288 bp, Artificial Sequence
  chimeric material
aactcatgccaagaccctctaggtagttgtctacaatgtgatgagagatgcaaggctaagcacgggccaacgggccaagcaagttgcgacagtcgaaaccaactatgcacgtgctattacacgtgcggagggaaggcaggtaaaaaagcaccaaaacaatgctacggtgggactggcttgtgcagcagtgcatgcaatcaaaactgtgcacaaaagtatcttggtggatctggattttgtgagagcattggcatctctagactgtgcaaatgccagtatccttgctga

SEQ ID NO: 282 - DNA, 285 bp, Artificial Sequence
  chimeric material
aactcatgccaagaccctctaggtagttgtctacaatgtgatgagagatgcaaggctaagcacgggccaacgggccaagcaagttgcgacagtcgaaaccaactatgcacgtgctattacacgtgcggagggaagccaggtaaaaaagcaccacaatgctacggtgggactggcttgtgcagcagtgcatgcaatcaaaactgtgcacaaaagtatcttggtggatctggattttgtgagagcattggcatctctagactgtgcaaatgccagtatccttgctga

SEQ ID NO: 283 - DNA, 288 bp, Artificial Sequence
  chimeric material
aactcatgccaagaccctctaggtagttgtctacaatgtgatgagagatgcaaggctaagcacgggccaacgggccaagcaagttgcgacagtcgaaaccaactatgcacgtgctattacacgtgcggagggaaggcaggtaaagatcaaataacacaatgctacggtgggactggcttgtgcagcagtgcatgcaatcaaaactgtgcacaaaagtatcttggtggatctggattttgtgagagcattggcatctctagactgtgcaaatgccagtatccttgctga

SEQ ID NO: 284 - DNA, 279 bp, Artificial Sequence
  chimeric material
aactcatgccaagaccctctaggtagttgtctacaatgtgatgagagatgcaaggctaagcacgggccaacgggccaagcaagttgcgacagtcgaaaccaactatgcacgtgctattacacgtgcgctggtcgtggtgataaaaaacaatgctacggtgggactggcttgtgcagcagtgcatgcaatcaaaactgtgcacaaaagtatcttggtggatctggattttgtgagagcattggcatctctagactgtgcaaatgccagtatccttgctga

SEQ ID NO: 285 - DNA, 306 bp, Artificial Sequence
  chimeric material
gaatgcacaaaaattgttggtagttgtgcaaaagaagattgtgcaactcattgtcaatcatatgcaaaaggtgttgctgttttaggatcatcatgttcatactacaacttatgcacttgtactcctcctacacctccgtcgcccccgacacggcccaattgtattattgggatgggaatttgcaatggtgactgtcaagatgaatgttgcaacaaaaggtgtgttagtcgatatagtaaaacgggttctgggaattgtgtcgatgcctttggtatgattctttgtctttgttcctatgatcgttga

SEQ ID NO: 286 - DNA, 303 bp, Artificial Sequence
  chimeric material
gaatgcacaaaaattgttggtagttgtgcaaaagaagattgtgcaactcattgtcaatcatatgcaaaaggtgttgctgttttaggatcatcatgttcatactacaacttatgcacttgtggaccgccatcaccaactcctccacatcacaaaaattgtattattgggatgggaatttgcaatggtgactgtcaagatgaatgttgcaacaaaaggtgtgttagtcgatatagtaaaacgggttctgggaattgtgtcgatgcctttggtatgattctttgtctttgttcctatgatcgttga

SEQ ID NO: 287 - DNA, 300 bp, Artificial Sequence
  chimeric material
gaatgcacaaaaattgttggtagttgtgcaaaagaagattgtgcaactcattgtcaatcatatgcaaaaggtgttgctgttttaggatcatcatgttcatactacaacttatgcacttgtggacctccatcgccgccgccatactcgaaaaattgtattattgggatgggaatttgcaatggtgactgtcaagatgaatgttgcaacaaaaggtgtgttagtcgatatagtaaaacgggttctgggaattgtgtcgatgcctttggtatgattctttgtctttgttcctatgatcgttga

SEQ ID NO: 288 - DNA, 303 bp, Artificial Sequence
  chimeric material
gaatgcacaaaaattgttggtagttgtgcaaaagaagattgtgcaactcattgtcaatcatatgcaaaaggtgttgctgttttaggatcatcatgttcatactacaacttatgcacttgtgaaccaccctcgctgacgtcgactccactcaataattgtattattgggatgggaatttgcaatggtgactgtcaagatgaatgttgcaacaaaaggtgtgttagtcgatatagtaaaacgggttctgggaattgtgtcgatgcctttggtatgattctttgtctttgttcctatgatcgttga

SEQ ID NO: 289 - DNA, 312 bp, Artificial Sequence
  chimeric material
gaatgcacaaaaattgttggtagttgtgcaaaagaagattgtgcaactcattgtcaatcatatgcaaaaggtgttgctgttttaggatcatcatgttcatactacaacttatgcacttgtttttacaatacgccacccccaaaaactcgaggaatacgaactaattgtattattgggatgggaatttgcaatggtgactgtcaagatgaatgttgcaacaaaaggtgtgttagtcgatatagtaaaacgggttctgggaattgtgtcgatgcctttggtatgattctttgtctttgttcctatgatcgttga

SEQ ID NO: 290 - DNA, 303 bp, Artificial Sequence
  chimeric material
gaatgcacaaaaattgttggtagttgtgcaaaagaagattgtgcaactcattgtcaatcatatgcaaaaggtgttgctgttttaggatcatcatgttcatactacaacttatgcacttgtggctctccgtcgaaacggccgccatcgcccaaaaattgtattattgggatgggaatttgcaatggtgactgtcaagatgaatgttgcaacaaaaggtgtgttagtcgatatagtaaaacgggttctgggaattgtgtcgatgcctttggtatgattctttgtctttgttcctatgatcgttga

SEQ ID NO: 291 - DNA, 291 bp, Artificial Sequence
  chimeric material
gaatgcacaaaaattgttggtagttgtgcaaaagaagattgtgcaactcattgtcaatcatatgcaaaaggtgttgctgttttaggatcatcatgttcatactacaacttatgcacttgtgctccaaagaaggtggaacctaattgtattattgggatgggaatttgcaatggtgactgtcaagatgaatgttgcaacaaaaggtgtgttagtcgatatagtaaaacgggttctgggaattgtgtcgatgcctttggtatgattctttgtctttgttcctatgatcgttga

SEQ ID NO: 292 - DNA, 300 bp, Artificial Sequence
  chimeric material
gaatgcacaaaaattgttggtagttgtgcaaaagaagattgtgcaactcattgtcaatcatatgcaaaaggtgttgctgttttaggatcatcatgttcatactacaacttatgcacttgtaacaacgagagtgcatcaccagcgtccaaaaattgtattattgggatgggaatttgcaatggtgactgtcaagatgaatgttgcaacaaaaggtgtgttagtcgatatagtaaaacgggttctgggaattgtgtcgatgcctttggtatgattctttgtctttgttcctatgatcgttga

SEQ ID NO: 293 - DNA, 306 bp, Artificial Sequence
  chimeric material
gaatgcacaaaaattgttggtagttgtgcaaaagaagattgtgcaactcattgtcaatcatatgcaaaaggtgttgctgttttaggatcatcatgttcatactacaacttatgcacttgtggagggaaggcaggtaaaaaagcaccaaaaagggataattgtattattgggatgggaatttgcaatggtgactgtcaagatgaatgttgcaacaaaaggtgtgttagtcgatatagtaaaacgggttctgggaattgtgtcgatgcctttggtatgattctttgtctttgttcctatgatcgttga

SEQ ID NO: 294 - DNA, 300 bp, Artificial Sequence
  chimeric material
gaatgcacaaaaattgttggtagttgtgcaaaagaagattgtgcaactcattgtcaatcatatgcaaaaggtgttgctgttttaggatcatcatgttcatactacaacttatgcacttgtggagggaaggcaggtaaaaaagcaccaaaaaattgtattattgggatgggaatttgcaatggtgactgtcaagatgaatgttgcaacaaaaggtgtgttagtcgatatagtaaaacgggttctgggaattgtgtcgatgcctttggtatgattctttgtctttgttcctatgatcgttga

SEQ ID NO: 295 - DNA, 300 bp, Artificial Sequence
  chimeric material
gaatgcacaaaaattgttggtagttgtgcaaaagaagattgtgcaactcattgtcaatcatatgcaaaaggtgttgctgttttaggatcatcatgttcatactacaacttatgcacttgtggagggaaggcaggtaaagatcaaataacaaattgtattattgggatgggaatttgcaatggtgactgtcaagatgaatgttgcaacaaaaggtgtgttagtcgatatagtaaaacgggttctgggaattgtgtcgatgcctttggtatgattctttgtctttgttcctatgatcgttga

SEQ ID NO: 296 - DNA, 291 bp, Artificial Sequence
  chimeric material
gaatgcacaaaaattgttggtagttgtgcaaaagaagattgtgcaactcattgtcaatcatatgcaaaaggtgttgctgttttaggatcatcatgttcatactacaacttatgcacttgtgctggtcgtggtgataaaaaaaattgtattattgggatgggaatttgcaatggtgactgtcaagatgaatgttgcaacaaaaggtgtgttagtcgatatagtaaaacgggttctgggaattgtgtcgatgcctttggtatgattctttgtctttgttcctatgatcgttga

SEQ ID NO: 297 - DNA, 336 bp, Artificial Sequence
  chimeric material
aaactttgtcaaaagcgaagtacaacatggtcaggaccttgtcttaacacaggaaactgcaaaagacaatgcattaatgtggagcatgctacttttggtgcttgtcatcgtcaaggctttggttttgcttgcttctgctacaaaaaatgtggaccgccatcaccaactcctccacatcacaaaaaactttgtgaaaggcgaagcaaaacatggtcaggaccttgtcttatctcaggaaattgtaaaagacagtgcatcaatgttgagcatgcaacttctggtgcttgtcaccgtcaaggcattggttttgcttgcttctgcaagaaaaaatgttga

SEQ ID NO: 298 - DNA, 333 bp, Artificial Sequence
  chimeric material
aaactttgtcaaaagcgaagtacaacatggtcaggaccttgtcttaacacaggaaactgcaaaagacaatgcattaatgtggagcatgctacttttggtgcttgtcatcgtcaaggctttggttttgcttgcttctgctacaaaaaatgtggacctccatcgccgccgccatactcgaaaaaactttgtgaaaggcgaagcaaaacatggtcaggaccttgtcttatctcaggaaattgtaaaagacagtgcatcaatgttgagcatgcaacttctggtgcttgtcaccgtcaaggcattggttttgcttgcttctgcaagaaaaaatgttga

SEQ ID NO: 299 - DNA, 330 bp, Artificial Sequence
  chimeric material
aaactttgtcaaaagcgaagtacaacatggtcaggaccttgtcttaacacaggaaactgcaaaagacaatgcattaatgtggagcatgctacttttggtgcttgtcatcgtcaaggctttggttttgcttgcttctgctacaaaaaatgtgaaccaccctcgctgactccactcaataaactttgtgaaaggcgaagcaaaacatggtcaggaccttgtcttatctcaggaaattgtaaaagacagtgcatcaatgttgagcatgcaacttctggtgcttgtcaccgtcaaggcattggttttgcttgcttctgcaagaaaaaatgttga

SEQ ID NO: 300 - DNA, 336 bp, Artificial Sequence
  chimeric material
aaactttgtcaaaagcgaagtacaacatggtcaggaccttgtcttaacacaggaaactgcaaaagacaatgcattaatgtggagcatgctacttttggtgcttgtcatcgtcaaggctttggttttgcttgcttctgctacaaaaaatgtgaaccaccctcgctgacgtcgactccactcaataaactttgtgaaaggcgaagcaaaacatggtcaggaccttgtcttatctcaggaaattgtaaaagacagtgcatcaatgttgagcatgcaacttctggtgcttgtcaccgtcaaggcattggttttgcttgcttctgcaagaaaaaatgttga

SEQ ID NO: 301 - DNA, 342 bp, Artificial Sequence
  chimeric material
aaactttgtcaaaagcgaagtacaacatggtcaggaccttgtcttaacacaggaaactgcaaaagacaatgcattaatgtggagcatgctacttttggtgcttgtcatcgtcaaggctttggttttgcttgcttctgctacaaaaaatgtacttttgataagccaccaccaggattaacaccacctggtaaactttgtgaaaggcgaagcaaaacatggtcaggaccttgtcttatctcaggaaattgtaaaagacagtgcatcaatgttgagcatgcaacttctggtgcttgtcaccgtcaaggcattggttttgcttgcttctgcaagaaaaaatgttga

SEQ ID NO: 302 - DNA, 345 bp, Artificial Sequence
  chimeric material
aaactttgtcaaaagcgaagtacaacatggtcaggaccttgtcttaacacaggaaactgcaaaagacaatgcattaatgtggagcatgctacttttggtgcttgtcatcgtcaaggctttggttttgcttgcttctgctacaaaaaatgtttttacaatacgccacccccaaaaactcgaggaatacgaactaaactttgtgaaaggcgaagcaaaacatggtcaggaccttgtcttatctcaggaaattgtaaaagacagtgcatcaatgttgagcatgcaacttctggtgcttgtcaccgtcaaggcattggttttgcttgcttctgcaagaaaaaatgttga

SEQ ID NO: 303 - DNA, 336 bp, Artificial Sequence
  chimeric material
aaactttgtcaaaagcgaagtacaacatggtcaggaccttgtcttaacacaggaaactgcaaaagacaatgcattaatgtggagcatgctacttttggtgcttgtcatcgtcaaggctttggttttgcttgcttctgctacaaaaaatgtggctctccgtcgaaacggccgccatcgcccaaaaaactttgtgaaaggcgaagcaaaacatggtcaggaccttgtcttatctcaggaaattgtaaaagacagtgcatcaatgttgagcatgcaacttctggtgcttgtcaccgtcaaggcattggttttgcttgcttctgcaagaaaaaatgttga

SEQ ID NO: 304 - DNA, 333 bp, Artificial Sequence
  chimeric material
aaactttgtcaaaagcgaagtacaacatggtcaggaccttgtcttaacacaggaaactgcaaaagacaatgcattaatgtggagcatgctacttttggtgcttgtcatcgtcaaggctttggttttgcttgcttctgctacaaaaaatgtggagggaaggcaggtaaagatcaaataacaaaactttgtgaaaggcgaagcaaaacatggtcaggaccttgtcttatctcaggaaattgtaaaagacagtgcatcaatgttgagcatgcaacttctggtgcttgtcaccgtcaaggcattggttttgcttgcttctgcaagaaaaaatgttga

SEQ ID NO: 305 - DNA, 324 bp, Artificial Sequence
  chimeric material
aaactttgtcaaaagcgaagtacaacatggtcaggaccttgtcttaacacaggaaactgcaaaagacaatgcattaatgtggagcatgctacttttggtgcttgtcatcgtcaaggctttggttttgcttgcttctgctacaaaaaatgtgctggtcgtggtgataaaaaaaaactttgtgaaaggcgaagcaaaacatggtcaggaccttgtcttatctcaggaaattgtaaaagacagtgcatcaatgttgagcatgcaacttctggtgcttgtcaccgtcaaggcattggttttgcttgcttctgcaagaaaaaatgttga

SEQ ID NO: 306 - DNA, 291 bp, Artificial Sequence
  chimeric material
aaaccttgcaacaacaatttaggtgattgtcaacaatgtgatgagaggtgcaaagctaagcacggaccaacgtgtcaaggtagttgtgacaacacttttaaacaatgcatctgtgcaaccccaccgactccgactccacccaagatatgctatagcggagctggcctgtgcaccacaaaatgttgggacgaatgttgcaacaaaacttgtgctagcatgtatttgaacggagttggatattgcgacagcattggccatattaatctatgcaaatgtcagtatccttgctga

SEQ ID NO: 307 - DNA, 294 bp, Artificial Sequence
  chimeric material
aaaccttgcaacaacaatttaggtgattgtcaacaatgtgatgagaggtgcaaagctaagcacggaccaacgtgtcaaggtagttgtgacaacacttttaaacaatgcatctgtggaccgccatcaccaactcctccacatcacaaaatatgctatagcggagctggcctgtgcaccacaaaatgttgggacgaatgttgcaacaaaacttgtgctagcatgtatttgaacggagttggatattgcgacagcattggccatattaatctatgcaaatgtcagtatccttgctga

SEQ ID NO: 308 - DNA, 288 bp, Artificial Sequence
  chimeric material
aaaccttgcaacaacaatttaggtgattgtcaacaatgtgatgagaggtgcaaagctaagcacggaccaacgtgtcaaggtagttgtgacaacacttttaaacaatgcatctgtgaaccaccctcgctgactccactcaatatatgctatagcggagctggcctgtgcaccacaaaatgttgggacgaatgttgcaacaaaacttgtgctagcatgtatttgaacggagttggatattgcgacagcattggccatattaatctatgcaaatgtcagtatccttgctga

SEQ ID NO: 309 - DNA, 294 bp, Artificial Sequence
  chimeric material
aaaccttgcaacaacaatttaggtgattgtcaacaatgtgatgagaggtgcaaagctaagcacggaccaacgtgtcaaggtagttgtgacaacacttttaaacaatgcatctgtgaaccaccctcgctgacgtcgactccactcaatatatgctatagcggagctggcctgtgcaccacaaaatgttgggacgaatgttgcaacaaaacttgtgctagcatgtatttgaacggagttggatattgcgacagcattggccatattaatctatgcaaatgtcagtatccttgctga

SEQ ID NO: 310 - DNA, 300 bp, Artificial Sequence
  chimeric material
aaaccttgcaacaacaatttaggtgattgtcaacaatgtgatgagaggtgcaaagctaagcacggaccaacgtgtcaaggtagttgtgacaacacttttaaacaatgcatctgtacttttgataagccaccaccaggattaacaccacctggtatatgctatagcggagctggcctgtgcaccacaaaatgttgggacgaatgttgcaacaaaacttgtgctagcatgtatttgaacggagttggatattgcgacagcattggccatattaatctatgcaaatgtcagtatccttgctga

SEQ ID NO: 311 - DNA, 303 bp, Artificial Sequence
  chimeric material
aaaccttgcaacaacaatttaggtgattgtcaacaatgtgatgagaggtgcaaagctaagcacggaccaacgtgtcaaggtagttgtgacaacacttttaaacaatgcatctgtttttacaatacgccacccccaaaaactcgaggaatacgaactatatgctatagcggagctggcctgtgcaccacaaaatgttgggacgaatgttgcaacaaaacttgtgctagcatgtatttgaacggagttggatattgcgacagcattggccatattaatctatgcaaatgtcagtatccttgctga

SEQ ID NO: 312 - DNA, 282 bp, Artificial Sequence
  chimeric material
aaaccttgcaacaacaatttaggtgattgtcaacaatgtgatgagaggtgcaaagctaagcacggaccaacgtgtcaaggtagttgtgacaacacttttaaacaatgcatctgtgctccaaagaaggtggaacctatatgctatagcggagctggcctgtgcaccacaaaatgttgggacgaatgttgcaacaaaacttgtgctagcatgtatttgaacggagttggatattgcgacagcattggccatattaatctatgcaaatgtcagtatccttgctga

SEQ ID NO: 313 - DNA, 297 bp, Artificial Sequence
  chimeric material
aaaccttgcaacaacaatttaggtgattgtcaacaatgtgatgagaggtgcaaagctaagcacggaccaacgtgtcaaggtagttgtgacaacacttttaaacaatgcatctgtggagggaaggcaggtaaaaaagcaccaaaaagggatatatgctatagcggagctggcctgtgcaccacaaaatgttgggacgaatgttgcaacaaaacttgtgctagcatgtatttgaacggagttggatattgcgacagcattggccatattaatctatgcaaatgtcagtatccttgctga

SEQ ID NO: 314 - DNA, 291 bp, Artificial Sequence
  chimeric material
aaaccttgcaacaacaatttaggtgattgtcaacaatgtgatgagaggtgcaaagctaagcacggaccaacgtgtcaaggtagttgtgacaacacttttaaacaatgcatctgtggagggaaggcaggtaaaaaagcaccaaaaatatgctatagcggagctggcctgtgcaccacaaaatgttgggacgaatgttgcaacaaaacttgtgctagcatgtatttgaacggagttggatattgcgacagcattggccatattaatctatgcaaatgtcagtatccttgctga

SEQ ID NO: 315 - DNA, 291 bp, Artificial Sequence
  chimeric material
aaaccttgcaacaacaatttaggtgattgtcaacaatgtgatgagaggtgcaaagctaagcacggaccaacgtgtcaaggtagttgtgacaacacttttaaacaatgcatctgtggagggaaggcaggtaaagatcaaataacaatatgctatagcggagctggcctgtgcaccacaaaatgttgggacgaatgttgcaacaaaacttgtgctagcatgtatttgaacggagttggatattgcgacagcattggccatattaatctatgcaaatgtcagtatccttgctga

SEQ ID NO: 316 - DNA, 282 bp, Artificial Sequence
  chimeric material
aaaccttgcaacaacaatttaggtgattgtcaacaatgtgatgagaggtgcaaagctaagcacggaccaacgtgtcaaggtagttgtgacaacacttttaaacaatgcatctgtgctggtcgtggtgataaaaaaatatgctatagcggagctggcctgtgcaccacaaaatgttgggacgaatgttgcaacaaaacttgtgctagcatgtatttgaacggagttggatattgcgacagcattggccatattaatctatgcaaatgtcagtatccttgctga

SEQ ID NO: 317 - DNA, 282 bp, Artificial Sequence
  chimeric material
aaaccttgcaacaacaatttaggtgattgtcaacaatgtgatgagaggtgcaaagctaagcacggaccaacgtgtcaaggtagttgtgacaacacttttaaacaatgcatctgtgcgtcatttaaaccagccaaaatatgctatagcggagctggcctgtgcaccacaaaatgttgggacgaatgttgcaacaaaacttgtgctagcatgtatttgaacggagttggatattgcgacagcattggccatattaatctatgcaaatgtcagtatccttgctga

SEQ ID NO: 318 - DNA, 309 bp, Artificial Sequence
  chimeric material
gaaaaatgctcactatttattgctggttgtcttgacacaccagcatgtgattcttattgtaaagatcagtggagtggtggaattgggatttgtagcaatgaaagatgcatttgtaatttcgaatgtgcaaccccaccgactccgactccacccaagagggattgtaatgcttctactggtccttgctctaaggagtgtggtgattcttgttgcaataacaaatgtgctagtaaatacaatcaaggtgtaggatattgtagatctcttctaccacctcttgctatgtgtcaatgcgtctatgcatgttga

SEQ ID NO: 319 - DNA, 315 bp, Artificial Sequence
  chimeric material
gaaaaatgctcactatttattgctggttgtcttgacacaccagcatgtgattcttattgtaaagatcagtggagtggtggaattgggatttgtagcaatgaaagatgcatttgtaatttcgaatgtactcctcctacacctccgtcgcccccgacacggcccagggattgtaatgcttctactggtccttgctctaaggagtgtggtgattcttgttgcaataacaaatgtgctagtaaatacaatcaaggtgtaggatattgtagatctcttctaccacctcttgctatgtgtcaatgcgtctatgcatgttga

SEQ ID NO: 320 - DNA, 309 bp, Artificial Sequence
  chimeric material
gaaaaatgctcactatttattgctggttgtcttgacacaccagcatgtgattcttattgtaaagatcagtggagtggtggaattgggatttgtagcaatgaaagatgcatttgtaatttcgaatgtggacctccatcgccgccgccatactcgaaaagggattgtaatgcttctactggtccttgctctaaggagtgtggtgattcttgttgcaataacaaatgtgctagtaaatacaatcaaggtgtaggatattgtagatctcttctaccacctcttgctatgtgtcaatgcgtctatgcatgttga

SEQ ID NO: 321 - DNA, 312 bp, Artificial Sequence
  chimeric material
gaaaaatgctcactatttattgctggttgtcttgacacaccagcatgtgattcttattgtaaagatcagtggagtggtggaattgggatttgtagcaatgaaagatgcatttgtaatttcgaatgtgaaccaccctcgctgacgtcgactccactcaatagggattgtaatgcttctactggtccttgctctaaggagtgtggtgattcttgttgcaataacaaatgtgctagtaaatacaatcaaggtgtaggatattgtagatctcttctaccacctcttgctatgtgtcaatgcgtctatgcatgttga

SEQ ID NO: 322 - DNA, 321 bp, Artificial Sequence
  chimeric material
gaaaaatgctcactatttattgctggttgtcttgacacaccagcatgtgattcttattgtaaagatcagtggagtggtggaattgggatttgtagcaatgaaagatgcatttgtaatttcgaatgtttttacaatacgccacccccaaaaactcgaggaatacgaactagggattgtaatgcttctactggtccttgctctaaggagtgtggtgattcttgttgcaataacaaatgtgctagtaaatacaatcaaggtgtaggatattgtagatctcttctaccacctcttgctatgtgtcaatgcgtctatgcatgttga

SEQ ID NO: 323 - DNA, 312 bp, Artificial Sequence
  chimeric material
gaaaaatgctcactatttattgctggttgtcttgacacaccagcatgtgattcttattgtaaagatcagtggagtggtggaattgggatttgtagcaatgaaagatgcatttgtaatttcgaatgtggctctccgtcgaaacggccgccatcgcccaaaagggattgtaatgcttctactggtccttgctctaaggagtgtggtgattcttgttgcaataacaaatgtgctagtaaatacaatcaaggtgtaggatattgtagatctcttctaccacctcttgctatgtgtcaatgcgtctatgcatgttga

SEQ ID NO: 324 - DNA, 309 bp, Artificial Sequence
  chimeric material
gaaaaatgctcactatttattgctggttgtcttgacacaccagcatgtgattcttattgtaaagatcagtggagtggtggaattgggatttgtagcaatgaaagatgcatttgtaatttcgaatgtaacaacgagagtgcatcaccagcgtccaaaagggattgtaatgcttctactggtccttgctctaaggagtgtggtgattcttgttgcaataacaaatgtgctagtaaatacaatcaaggtgtaggatattgtagatctcttctaccacctcttgctatgtgtcaatgcgtctatgcatgttga

SEQ ID NO: 325 - DNA, 315 bp, Artificial Sequence
  chimeric material
gaaaaatgctcactatttattgctggttgtcttgacacaccagcatgtgattcttattgtaaagatcagtggagtggtggaattgggatttgtagcaatgaaagatgcatttgtaatttcgaatgtggagggaaggcaggtaaaaaagcaccaaaaagggatagggattgtaatgcttctactggtccttgctctaaggagtgtggtgattcttgttgcaataacaaatgtgctagtaaatacaatcaaggtgtaggatattgtagatctcttctaccacctcttgctatgtgtcaatgcgtctatgcatgttga

SEQ ID NO: 326 - DNA, 309 bp, Artificial Sequence
  chimeric material
gaaaaatgctcactatttattgctggttgtcttgacacaccagcatgtgattcttattgtaaagatcagtggagtggtggaattgggatttgtagcaatgaaagatgcatttgtaatttcgaatgtggagggaaggcaggtaaagatcaaataacaagggattgtaatgcttctactggtccttgctctaaggagtgtggtgattcttgttgcaataacaaatgtgctagtaaatacaatcaaggtgtaggatattgtagatctcttctaccacctcttgctatgtgtcaatgcgtctatgcatgttga

SEQ ID NO: 327 - DNA, 300 bp, Artificial Sequence
  chimeric material
gaaaaatgctcactatttattgctggttgtcttgacacaccagcatgtgattcttattgtaaagatcagtggagtggtggaattgggatttgtagcaatgaaagatgcatttgtaatttcgaatgtgctggtcgtggtgataaaaaaagggattgtaatgcttctactggtccttgctctaaggagtgtggtgattcttgttgcaataacaaatgtgctagtaaatacaatcaaggtgtaggatattgtagatctcttctaccacctcttgctatgtgtcaatgcgtctatgcatgttga

SEQ ID NO: 328 - DNA, 300 bp, Artificial Sequence
  chimeric material
gaaaaatgctcactatttattgctggttgtcttgacacaccagcatgtgattcttattgtaaagatcagtggagtggtggaattgggatttgtagcaatgaaagatgcatttgtaatttcgaatgtgcgtcatttaaaccagccaaaagggattgtaatgcttctactggtccttgctctaaggagtgtggtgattcttgttgcaataacaaatgtgctagtaaatacaatcaaggtgtaggatattgtagatctcttctaccacctcttgctatgtgtcaatgcgtctatgcatgttga

SEQ ID NO: 329 - protein, 136 aa, Artificial Sequence
  chimeric material
MALSRRMGAPVLILVLLLVATELGTTKVAEARHCLSQSHRFKGLCMSSNNCANVCQTENFPGGECKAEGATRKCFCKKICASFKPAKRHCLSQSHRFKGLCMSSNNCANVCQTENFPGGECKAEGATRKCFCKKIC

SEQ ID NO: 330 - protein, 139 aa, Artificial Sequence
  chimeric material
MALSRRMGAPVLILVLLLVATELGTTKVAEARHCLSQSHRFKGLCMSSNNCANVCQTENFPGGECKAEGATRKCFCKKICATPPTPTPPKRHCLSQSHRFKGLCMSSNNCANVCQTENFPGGECKAEGATRKCFCKKIC

SEQ ID NO: 331 - protein, 141 aa, Artificial Sequence
  chimeric material
MALSRRMGAPVLILVLLLVATELGTTKVAEARHCLSQSHRFKGLCMSSNNCANVCQTENFPGGECKAEGATRKCFCKKICTPPTPPSPPTRPRHCLSQSHRFKGLCMSSNNCANVCQTENFPGGECKAEGATRKCFCKKIC

SEQ ID NO: 332 - protein, 140 aa, Artificial Sequence
  chimeric material
MALSRRMGAPVLILVLLLVATELGTTKVAEARHCLSQSHRFKGLCMSSNNCANVCQTENFPGGECKAEGATRKCFCKKICGPPSPTPPHHKRHCLSQSHRFKGLCMSSNNCANVCQTENFPGGECKAEGATRKCFCKKIC

SEQ ID NO: 333 - protein, 138 aa, Artificial Sequence
  chimeric material
MALSRRMGAPVLILVLLLVATELGTTKVAEARHCLSQSHRFKGLCMSSNNCANVCQTENFPGGECKAEGATRKCFCKKICEPPSLTPLNRHCLSQSHRFKGLCMSSNNCANVCQTENFPGGECKAEGATRKCFCKKIC

SEQ ID NO: 334 - protein, 140 aa, Artificial Sequence
  chimeric material
MALSRRMGAPVLILVLLLVATELGTTKVAEARHCLSQSHRFKGLCMSSNNCANVCQTENFPGGECKAEGATRKCFCKKICEPPSLTSTPLNRHCLSQSHRFKGLCMSSNNCANVCQTENFPGGECKAEGATRKCFCKKIC

SEQ ID NO: 335 - protein, 139 aa, Artificial Sequence
  chimeric material
MALSRRMGAPVLILVLLLVATELGTTKVAEARHCLSQSHRFKGLCMSSNNCANVCQTENFPGGECKAEGATRKCFCKKICNNESASPASKRHCLSQSHRFKGLCMSSNNCANVCQTENFPGGECKAEGATRKCFCKKIC

SEQ ID NO: 336 - protein, 136 aa, Artificial Sequence
  chimeric material
MALSRRMGAPVLILVLLLVATELGTTKVAEARHCLSQSHRFKGLCMSSNNCANVCQTENFPGGECKAEGATRKCFCKKICAGRGDKKRHCLSQSHRFKGLCMSSNNCANVCQTENFPGGECKAEGATRKCFCKKIC

SEQ ID NO: 337 - protein, 140 aa, Artificial Sequence
  chimeric material
MALSRRMGAPVLILVLLLVATELGTTKVAEARHCLSQSHRFKGLCMSSNNCANVCQTENFPGGECKAEGATRKCFCKKICGSPSKRPPSPKRHCLSQSHRFKGLCMSSNNCANVCQTENFPGGECKAEGATRKCFCKKIC

SEQ ID NO: 338 - protein, 139 aa, Artificial Sequence
  chimeric material
MALSRRMGAPVLILVLLLVATELGTTKVAEARHCLSQSHRFKGLCMSSNNCANVCQTENFPGGECKAEGATRKCFCKKICGPPSPPPYSKRHCLSQSHRFKGLCMSSNNCANVCQTENFPGGECKAEGATRKCFCKKIC

SEQ ID NO: 339 - protein, 136 aa, Artificial Sequence
  chimeric material
MALSRRMGAPVLILVLLLVATELGTTKVAEARHCLSQSHRFKGLCMSSNNCANVCQTENFPGGECKAEGATRKCFCKKICAPKKVEPRHCLSQSHRFKGLCMSSNNCANVCQTENFPGGECKAEGATRKCFCKKIC

SEQ ID NO: 340 - protein, 142 aa, Artificial Sequence
  chimeric material
MALSRRMGAPVLILVLLLVATELGTTKVAEARHCLSQSHRFKGLCMSSNNCANVCQTENFPGGECKAEGATRKCFCKKICTFDKPPPGLTPPGRHCLSQSHRFKGLCMSSNNCANVCQTENFPGGECKAEGATRKCFCKKIC

SEQ ID NO: 341 - protein, 139 aa, Artificial Sequence
  chimeric material
MALSRRMGAPVLILVLLLVATELGTTKVAEARHCLSQSHRFKGLCMSSNNCANVCQTENFPGGECKAEGATRKCFCKKICGGKAGKKAPKRHCLSQSHRFKGLCMSSNNCANVCQTENFPGGECKAEGATRKCFCKKIC

SEQ ID NO: 342 - protein, 141 aa, Artificial Sequence
  chimeric material
MALSRRMGAPVLILVLLLVATELGTTKVAEARHCLSQSHRFKGLCMSSNNCANVCQTENFPGGECKAEGATRKCFCKKICGGKAGKKAPKRDRHCLSQSHRFKGLCMSSNNCANVCQTENFPGGECKAEGATRKCFCKKIC

SEQ ID NO: 343 - protein, 138 aa, Artificial Sequence
  chimeric material
MALSRRMGAPVLILVLLLVATELGTTKVAEARHCLSQSHRFKGLCMSSNNCANVCQTENFPGGECKAEGATRKCFCKKICGGKPGKKAPRHCLSQSHRFKGLCMSSNNCANVCQTENFPGGECKAEGATRKCFCKKIC

SEQ ID NO: 344 - protein, 143 aa, Artificial Sequence
  chimeric material
MALSRRMGAPVLILVLLLVATELGTTKVAEARHCLSQSHRFKGLCMSSNNCANVCQTENFPGGECKAEGATRKCFCKKICFYNTPPPKTRGIRTRHCLSQSHRFKGLCMSSNNCANVCQTENFPGGECKAEGATRKCFCKKIC

SEQ ID NO: 345 - protein, 139 aa, Artificial Sequence
  chimeric material
MALSRRMGAPVLILVLLLVATELGTTKVAEARHCLSQSHRFKGLCMSSNNCANVCQTENFPGGECKAEGATRKCFCKKICGGKAGKDQITRHCLSQSHRFKGLCMSSNNCANVCQTENFPGGECKAEGATRKCFCKKIC

SEQ ID NO: 346 - protein, 130 aa, Artificial Sequence
  chimeric material
MARSVPLVSTIFVFLLLLVATGPSMVAEARTCESQSHKFKGPCASDHNCASVCQTERFSGGRCRGFRRRCFCTTHCASFKPAKRTCESQSHKFKGPCASDHNCASVCQTERFSGGRCRGFRRRCFCTTHC

SEQ ID NO: 347 - protein, 133 aa, Artificial Sequence
  chimeric material
MARSVPLVSTIFVFLLLLVATGPSMVAEARTCESQSHKFKGPCASDHNCASVCQTERFSGGRCRGFRRRCFCTTHCATPPTPTPPKRTCESQSHKFKGPCASDHNCASVCQTERFSGGRCRGFRRRCFCTTHC

SEQ ID NO: 348 - protein, 135 aa, Artificial Sequence
  chimeric material
MARSVPLVSTIFVFLLLLVATGPSMVAEARTCESQSHKFKGPCASDHNCASVCQTERFSGGRCRGFRRRCFCTTHCTPPTPPSPPTRPRTCESQSHKFKGPCASDHNCASVCQTERFSGGRCRGFRRRCFCTTHC

SEQ ID NO: 349 - protein, 134 aa, Artificial Sequence
  chimeric material
MARSVPLVSTIFVFLLLLVATGPSMVAEARTCESQSHKFKGPCASDHNCASVCQTERFSGGRCRGFRRRCFCTTHCGPPSPTPPHHKRTCESQSHKFKGPCASDHNCASVCQTERFSGGRCRGFRRRCFCTTHC

SEQ ID NO: 350 - protein, 132 aa, Artificial Sequence
  chimeric material
MARSVPLVSTIFVFLLLLVATGPSMVAEARTCESQSHKFKGPCASDHNCASVCQTERFSGGRCRGFRRRCFCTTHCEPPSLTPLNRTCESQSHKFKGPCASDHNCASVCQTERFSGGRCRGFRRRCFCTTHC

SEQ ID NO: 351 - protein, 134 aa, Artificial Sequence
  chimeric material
MARSVPLVSTIFVFLLLLVATGPSMVAEARTCESQSHKFKGPCASDHNCASVCQTERFSGGRCRGFRRRCFCTTHCEPPSLTSTPLNRTCESQSHKFKGPCASDHNCASVCQTERFSGGRCRGFRRRCFCTTHC

SEQ ID NO: 352 - protein, 133 aa, Artificial Sequence
  chimeric material
MARSVPLVSTIFVFLLLLVATGPSMVAEARTCESQSHKFKGPCASDHNCASVCQTERFSGGRCRGFRRRCFCTTHCNNESASPASKRTCESQSHKFKGPCASDHNCASVCQTERFSGGRCRGFRRRCFCTTHC

SEQ ID NO: 353 - protein, 130 aa, Artificial Sequence
  chimeric material
MARSVPLVSTIFVFLLLLVATGPSMVAEARTCESQSHKFKGPCASDHNCASVCQTERFSGGRCRGFRRRCFCTTHCAGRGDKKRTCESQSHKFKGPCASDHNCASVCQTERFSGGRCRGFRRRCFCTTHC

SEQ ID NO: 354 - protein, 134 aa, Artificial Sequence
  chimeric material
MARSVPLVSTIFVFLLLLVATGPSMVAEARTCESQSHKFKGPCASDHNCASVCQTERFSGGRCRGFRRRCFCTTHCGSPSKRPPSPKRTCESQSHKFKGPCASDHNCASVCQTERFSGGRCRGFRRRCFCTTHC

SEQ ID NO: 355 - protein, 133 aa, Artificial Sequence
  chimeric material
MARSVPLVSTIFVFLLLLVATGPSMVAEARTCESQSHKFKGPCASDHNCASVCQTERFSGGRCRGFRRRCFCTTHCGPPSPPPYSKRTCESQSHKFKGPCASDHNCASVCQTERFSGGRCRGFRRRCFCTTHC

SEQ ID NO: 356 - protein, 130 aa, Artificial Sequence
  chimeric material
MARSVPLVSTIFVFLLLLVATGPSMVAEARTCESQSHKFKGPCASDHNCASVCQTERFSGGRCRGFRRRCFCTTHCAPKKVEPRTCESQSHKFKGPCASDHNCASVCQTERFSGGRCRGFRRRCFCTTHC

SEQ ID NO: 357 - protein, 136 aa, Artificial Sequence
  chimeric material
MARSVPLVSTIFVFLLLLVATGPSMVAEARTCESQSHKFKGPCASDHNCASVCQTERFSGGRCRGFRRRCFCTTHCTFDKPPPGLTPPGRTCESQSHKFKGPCASDHNCASVCQTERFSGGRCRGFRRRCFCTTHC

SEQ ID NO: 358 - protein, 133 aa, Artificial Sequence
  chimeric material
MARSVPLVSTIFVFLLLLVATGPSMVAEARTCESQSHKFKGPCASDHNCASVCQTERFSGGRCRGFRRRCFCTTHCGGKAGKKAPKRTCESQSHKFKGPCASDHNCASVCQTERFSGGRCRGFRRRCFCTTHC

SEQ ID NO: 359 - protein, 135 aa, Artificial Sequence
  chimeric material
MARSVPLVSTIFVFLLLLVATGPSMVAEARTCESQSHKFKGPCASDHNCASVCQTERFSGGRCRGFRRRCFCTTHCGGKAGKKAPKRDRTCESQSHKFKGPCASDHNCASVCQTERFSGGRCRGFRRRCFCTTHC

SEQ ID NO: 360 - protein, 132 aa, Artificial Sequence
  chimeric material
MARSVPLVSTIFVFLLLLVATGPSMVAEARTCESQSHKFKGPCASDHNCASVCQTERFSGGRCRGFRRRCFCTTHCGGKPGKKAPRTCESQSHKFKGPCASDHNCASVCQTERFSGGRCRGFRRRCFCTTHC

SEQ ID NO: 361 - protein, 137 aa, Artificial Sequence
  chimeric material
MARSVPLVSTIFVFLLLLVATGPSMVAEARTCESQSHKFKGPCASDHNCASVCQTERFSGGRCRGFRRRCFCTTHCFYNTPPPKTRGIRTRTCESQSHKFKGPCASDHNCASVCQTERFSGGRCRGFRRRCFCTTHC

SEQ ID NO: 362 - protein, 133 aa, Artificial Sequence
  chimeric material
MARSVPLVSTIFVFLLLLVATGPSMVAEARTCESQSHKFKGPCASDHNCASVCQTERFSGGRCRGFRRRCFCTTHCGGKAGKDQITRTCESQSHKFKGPCASDHNCASVCQTERFSGGRCRGFRRRCFCTTHC

SEQ ID NO: 363 - protein, 105 aa, Artificial Sequence
  chimeric material
RHCLSQSHRFKGLCMSSNNCANVCQTENFPGGECKAEGATRKCFCKKICASFKPAKRHCLSQSHRFKGLCMSSNNCANVCQTENFPGGECKAEGATRKCFCKKIC

SEQ ID NO: 364 - protein, 108 aa, Artificial Sequence
  chimeric material
RHCLSQSHRFKGLCMSSNNCANVCQTENFPGGECKAEGATRKCFCKKICATPPTPTPPKRHCLSQSHRFKGLCMSSNNCANVCQTENFPGGECKAEGATRKCFCKKIC

SEQ ID NO: 365 - protein, 110 aa, Artificial Sequence
  chimeric material
RHCLSQSHRFKGLCMSSNNCANVCQTENFPGGECKAEGATRKCFCKKICTPPTPPSPPTRPRHCLSQSHRFKGLCMSSNNCANVCQTENFPGGECKAEGATRKCFCKKIC

SEQ ID NO: 366 - protein, 109 aa, Artificial Sequence
  chimeric material
RHCLSQSHRFKGLCMSSNNCANVCQTENFPGGECKAEGATRKCFCKKICGPPSPTPPHHKRHCLSQSHRFKGLCMSSNNCANVCQTENFPGGECKAEGATRKCFCKKIC

SEQ ID NO: 367 - protein, 107 aa, Artificial Sequence
  chimeric material
RHCLSQSHRFKGLCMSSNNCANVCQTENFPGGECKAEGATRKCFCKKICEPPSLTPLNRHCLSQSHRFKGLCMSSNNCANVCQTENFPGGECKAEGATRKCFCKKIC

SEQ ID NO: 368 - protein, 109 aa, Artificial Sequence
  chimeric material
RHCLSQSHRFKGLCMSSNNCANVCQTENFPGGECKAEGATRKCFCKKICEPPSLTSTPLNRHCLSQSHRFKGLCMSSNNCANVCQTENFPGGECKAEGATRKCFCKKIC

SEQ ID NO: 369 - protein, 108 aa, Artificial Sequence
  chimeric material
RHCLSQSHRFKGLCMSSNNCANVCQTENFPGGECKAEGATRKCFCKKICNNESASPASKRHCLSQSHRFKGLCMSSNNCANVCQTENFPGGECKAEGATRKCFCKKIC

SEQ ID NO: 370 - protein, 105 aa, Artificial Sequence
  chimeric material
RHCLSQSHRFKGLCMSSNNCANVCQTENFPGGECKAEGATRKCFCKKICAGRGDKKRHCLSQSHRFKGLCMSSNNCANVCQTENFPGGECKAEGATRKCFCKKIC

SEQ ID NO: 371 - protein, 109 aa, Artificial Sequence
  chimeric material
RHCLSQSHRFKGLCMSSNNCANVCQTENFPGGECKAEGATRKCFCKKICGSPSKRPPSPKRHCLSQSHRFKGLCMSSNNCANVCQTENFPGGECKAEGATRKCFCKKIC

SEQ ID NO: 372 - protein, 108 aa, Artificial Sequence
  chimeric material
RHCLSQSHRFKGLCMSSNNCANVCQTENFPGGECKAEGATRKCFCKKICGPPSPPPYSKRHCLSQSHRFKGLCMSSNNCANVCQTENFPGGECKAEGATRKCFCKKIC

SEQ ID NO: 373 - protein, 105 aa, Artificial Sequence
  chimeric material
RHCLSQSHRFKGLCMSSNNCANVCQTENFPGGECKAEGATRKCFCKKICAPKKVEPRHCLSQSHRFKGLCMSSNNCANVCQTENFPGGECKAEGATRKCFCKKIC

SEQ ID NO: 374 - protein, 111 aa, Artificial Sequence
  chimeric material
RHCLSQSHRFKGLCMSSNNCANVCQTENFPGGECKAEGATRKCFCKKICTFDKPPPGLTPPGRHCLSQSHRFKGLCMSSNNCANVCQTENFPGGECKAEGATRKCFCKKIC

SEQ ID NO: 375 - protein, 108 aa, Artificial Sequence
  chimeric material
RHCLSQSHRFKGLCMSSNNCANVCQTENFPGGECKAEGATRKCFCKKICGGKAGKKAPKRHCLSQSHRFKGLCMSSNNCANVCQTENFPGGECKAEGATRKCFCKKIC

SEQ ID NO: 376 - protein, 110 aa, Artificial Sequence
  chimeric material
RHCLSQSHRFKGLCMSSNNCANVCQTENFPGGECKAEGATRKCFCKKICGGKAGKKAPKRDRHCLSQSHRFKGLCMSSNNCANVCQTENFPGGECKAEGATRKCFCKKIC

SEQ ID NO: 377 - protein, 107 aa, Artificial Sequence
  chimeric material
RHCLSQSHRFKGLCMSSNNCANVCQTENFPGGECKAEGATRKCFCKKICGGKPGKKAPRHCLSQSHRFKGLCMSSNNCANVCQTENFPGGECKAEGATRKCFCKKIC

SEQ ID NO: 378 - protein, 112 aa, Artificial Sequence
  chimeric material
RHCLSQSHRFKGLCMSSNNCANVCQTENFPGGECKAEGATRKCFCKKICFYNTPPPKTRGIRTRHCLSQSHRFKGLCMSSNNCANVCQTENFPGGECKAEGATRKCFCKKIC

SEQ ID NO: 379 - protein, 108 aa, Artificial Sequence
  chimeric material
RHCLSQSHRFKGLCMSSNNCANVCQTENFPGGECKAEGATRKCFCKKICGGKAGKDQITRHCLSQSHRFKGLCMSSNNCANVCQTENFPGGECKAEGATRKCFCKKIC

SEQ ID NO: 380 - protein, 101 aa, Artificial Sequence
  chimeric material
RTCESQSHKFKGPCASDHNCASVCQTERFSGGRCRGFRRRCFCTTHCASFKPAKRTCESQSHKFKGPCASDHNCASVCQTERFSGGRCRGFRRRCFCTTHC

SEQ ID NO: 381 - protein, 104 aa, Artificial Sequence
  chimeric material
RTCESQSHKFKGPCASDHNCASVCQTERFSGGRCRGFRRRCFCTTHCATPPTPTPPKRTCESQSHKFKGPCASDHNCASVCQTERFSGGRCRGFRRRCFCTTHC

SEQ ID NO: 382 - protein, 106 aa, Artificial Sequence
  chimeric material
RTCESQSHKFKGPCASDHNCASVCQTERFSGGRCRGFRRRCFCTTHCTPPTPPSPPTRPRTCESQSHKFKGPCASDHNCASVCQTERFSGGRCRGFRRRCFCTTHC

SEQ ID NO: 383 - protein, 105 aa, Artificial Sequence
  chimeric material
RTCESQSHKFKGPCASDHNCASVCQTERFSGGRCRGFRRRCFCTTHCGPPSPTPPHHKRTCESQSHKFKGPCASDHNCASVCQTERFSGGRCRGFRRRCFCTTHC

SEQ ID NO: 384 - protein, 103 aa, Artificial Sequence
  chimeric material
RTCESQSHKFKGPCASDHNCASVCQTERFSGGRCRGFRRRCFCTTHCEPPSLTPLNRTCESQSHKFKGPCASDHNCASVCQTERFSGGRCRGFRRRCFCTTHC

SEQ ID NO: 385 - protein, 105 aa, Artificial Sequence
  chimeric material
RTCESQSHKFKGPCASDHNCASVCQTERFSGGRCRGFRRRCFCTTHCEPPSLTSTPLNRTCESQSHKFKGPCASDHNCASVCQTERFSGGRCRGFRRRCFCTTHC

SEQ ID NO: 386 - protein, 104 aa, Artificial Sequence
  chimeric material
RTCESQSHKFKGPCASDHNCASVCQTERFSGGRCRGFRRRCFCTTHCNNESASPASKRTCESQSHKFKGPCASDHNCASVCQTERFSGGRCRGFRRRCFCTTHC

SEQ ID NO: 387 - protein, 101 aa, Artificial Sequence
  chimeric material
RTCESQSHKFKGPCASDHNCASVCQTERFSGGRCRGFRRRCFCTTHCAGRGDKKRTCESQSHKFKGPCASDHNCASVCQTERFSGGRCRGFRRRCFCTTHC

SEQ ID NO: 388 - protein, 105 aa, Artificial Sequence
  chimeric material
RTCESQSHKFKGPCASDHNCASVCQTERFSGGRCRGFRRRCFCTTHCGSPSKRPPSPKRTCESQSHKFKGPCASDHNCASVCQTERFSGGRCRGFRRRCFCTTHC

SEQ ID NO: 389 - protein, 104 aa, Artificial Sequence
  chimeric material
RTCESQSHKFKGPCASDHNCASVCQTERFSGGRCRGFRRRCFCTTHCGPPSPPPYSKRTCESQSHKFKGPCASDHNCASVCQTERFSGGRCRGFRRRCFCTTHC

SEQ ID NO: 390 - protein, 101 aa, Artificial Sequence
  chimeric material
RTCESQSHKFKGPCASDHNCASVCQTERFSGGRCRGFRRRCFCTTHCAPKKVEPRTCESQSHKFKGPCASDHNCASVCQTERFSGGRCRGFRRRCFCTTHC

SEQ ID NO: 391 - protein, 107 aa, Artificial Sequence
  chimeric material
RTCESQSHKFKGPCASDHNCASVCQTERFSGGRCRGFRRRCFCTTHCTFDKPPPGLTPPGRTCESQSHKFKGPCASDHNCASVCQTERFSGGRCRGFRRRCFCTTHC

SEQ ID NO: 392 - protein, 104 aa, Artificial Sequence
  chimeric material
RTCESQSHKFKGPCASDHNCASVCQTERFSGGRCRGFRRRCFCTTHCGGKAGKKAPKRTCESQSHKFKGPCASDHNCASVCQTERFSGGRCRGFRRRCFCTTHC

SEQ ID NO: 393 - protein, 106 aa, Artificial Sequence
  chimeric material
RTCESQSHKFKGPCASDHNCASVCQTERFSGGRCRGFRRRCFCTTHCGGKAGKKAPKRDRTCESQSHKFKGPCASDHNCASVCQTERFSGGRCRGFRRRCFCTTHC

SEQ ID NO: 394 - protein, 103 aa, Artificial Sequence
  chimeric material
RTCESQSHKFKGPCASDHNCASVCQTERFSGGRCRGFRRRCFCTTHCGGKPGKKAPRTCESQSHKFKGPCASDHNCASVCQTERFSGGRCRGFRRRCFCTTHC

SEQ ID NO: 395 - protein, 108 aa, Artificial Sequence
  chimeric material
RTCESQSHKFKGPCASDHNCASVCQTERFSGGRCRGFRRRCFCTTHCFYNTPPPKTRGIRTRTCESQSHKFKGPCASDHNCASVCQTERFSGGRCRGFRRRCFCTTHC

SEQ ID NO: 396 - protein, 104 aa, Artificial Sequence
  chimeric material
RTCESQSHKFKGPCASDHNCASVCQTERFSGGRCRGFRRRCFCTTHCGGKAGKDQITRTCESQSHKFKGPCASDHNCASVCQTERFSGGRCRGFRRRCFCTTHC

SEQ ID NO: 397 - protein, 95 aa, Artificial Sequence
  chimeric material
NSCQDPLGSCLQCDERCKAKHGPTGQASCDSRNQLCTCYYTCATPPTPTPPKQCYGGTGLCSSACNQNCAQKYLGGSGFCESIGISRLCKCQYPC

SEQ ID NO: 398 - protein, 97 aa, Artificial Sequence
  chimeric material
NSCQDPLGSCLQCDERCKAKHGPTGQASCDSRNQLCTCYYTCTPPTPPSPPTRPQCYGGTGLCSSACNQNCAQKYLGGSGFCESIGISRLCKCQYPC

SEQ ID NO: 399 - protein, 95 aa, Artificial Sequence
  chimeric material
NSCQDPLGSCLQCDERCKAKHGPTGQASCDSRNQLCTCYYTCGPPSPPPYSKQCYGGTGLCSSACNQNCAQKYLGGSGFCESIGISRLCKCQYPC

SEQ ID NO: 400 - protein, 94 aa, Artificial Sequence
  chimeric material
NSCQDPLGSCLQCDERCKAKHGPTGQASCDSRNQLCTCYYTCEPPSLTPLNQCYGGTGLCSSACNQNCAQKYLGGSGFCESIGISRLCKCQYPC

SEQ ID NO: 401 - protein, 96 aa, Artificial Sequence
  chimeric material
NSCQDPLGSCLQCDERCKAKHGPTGQASCDSRNQLCTCYYTCEPPSLTSTPLNQCYGGTGLCSSACNQNCAQKYLGGSGFCESIGISRLCKCQYPC

SEQ ID NO: 402 - protein, 98 aa, Artificial Sequence
  chimeric material
NSCQDPLGSCLQCDERCKAKHGPTGQASCDSRNQLCTCYYTCTFDKPPPGLTPPGQCYGGTGLCSSACNQNCAQKYLGGSGFCESIGISRLCKCQYPC

SEQ ID NO: 403 - protein, 99 aa, Artificial Sequence
  chimeric material
NSCQDPLGSCLQCDERCKAKHGPTGQASCDSRNQLCTCYYTCFYNTPPPKTRGIRTQCYGGTGLCSSACNQNCAQKYLGGSGFCESIGISRLCKCQYPC

SEQ ID NO: 404 - protein, 96 aa, Artificial Sequence
  chimeric material
NSCQDPLGSCLQCDERCKAKHGPTGQASCDSRNQLCTCYYTCGSPSKRPPSPKQCYGGTGLCSSACNQNCAQKYLGGSGFCESIGISRLCKCQYPC

SEQ ID NO: 405 - protein, 92 aa, Artificial Sequence
  chimeric material
NSCQDPLGSCLQCDERCKAKHGPTGQASCDSRNQLCTCYYTCAPKKVEPQCYGGTGLCSSACNQNCAQKYLGGSGFCESIGISRLCKCQYPC

SEQ ID NO: 406 - protein, 97 aa, Artificial Sequence
  chimeric material
NSCQDPLGSCLQCDERCKAKHGPTGQASCDSRNQLCTCYYTCGGKAGKKAPKRDQCYGGTGLCSSACNQNCAQKYLGGSGFCESIGISRLCKCQYPC

SEQ ID NO: 407 - protein, 95 aa, Artificial Sequence
  chimeric material
NSCQDPLGSCLQCDERCKAKHGPTGQASCDSRNQLCTCYYTCGGKAGKKAPKQCYGGTGLCSSACNQNCAQKYLGGSGFCESIGISRLCKCQYPC

SEQ ID NO: 408 - protein, 94 aa, Artificial Sequence
  chimeric material
NSCQDPLGSCLQCDERCKAKHGPTGQASCDSRNQLCTCYYTCGGKPGKKAPQCYGGTGLCSSACNQNCAQKYLGGSGFCESIGISRLCKCQYPC

SEQ ID NO: 409 - protein, 95 aa, Artificial Sequence
  chimeric material
NSCQDPLGSCLQCDERCKAKHGPTGQASCDSRNQLCTCYYTCGGKAGKDQITQCYGGTGLCSSACNQNCAQKYLGGSGFCESIGISRLCKCQYPC

SEQ ID NO: 410 - protein, 92 aa, Artificial Sequence
  chimeric material
NSCQDPLGSCLQCDERCKAKHGPTGQASCDSRNQLCTCYYTCAGRGDKKQCYGGTGLCSSACNQNCAQKYLGGSGFCESIGISRLCKCQYPC

SEQ ID NO: 411 - protein, 101 aa, Artificial Sequence
  chimeric material
ECTKIVGSCAKEDCATHCQSYAKGVAVLGSSCSYYNLCTCTPPTPPSPPTRPNCIIGMGICNGDCQDECCNKRCVSRYSKTGSGNCVDAFGMILCLCSYDR

SEQ ID NO: 412 - protein, 100 aa, Artificial Sequence
  chimeric material
ECTKIVGSCAKEDCATHCQSYAKGVAVLGSSCSYYNLCTCGPPSPTPPHHKNCIIGMGICNGDCQDECCNKRCVSRYSKTGSGNCVDAFGMILCLCSYDR

SEQ ID NO: 413 - protein, 99 aa, Artificial Sequence
  chimeric material
ECTKIVGSCAKEDCATHCQSYAKGVAVLGSSCSYYNLCTCGPPSPPPYSKNCIIGMGICNGDCQDECCNKRCVSRYSKTGSGNCVDAFGMILCLCSYDR

SEQ ID NO: 414 - protein, 100 aa, Artificial Sequence
  chimeric material
ECTKIVGSCAKEDCATHCQSYAKGVAVLGSSCSYYNLCTCEPPSLTSTPLNNCIIGMGICNGDCQDECCNKRCVSRYSKTGSGNCVDAFGMILCLCSYDR

SEQ ID NO: 415 - protein, 103 aa, Artificial Sequence
  chimeric material
ECTKIVGSCAKEDCATHCQSYAKGVAVLGSSCSYYNLCTCFYNTPPPKTRGIRTNCIIGMGICNGDCQDECCNKRCVSRYSKTGSGNCVDAFGMILCLCSYDR

SEQ ID NO: 416 - protein, 100 aa, Artificial Sequence
  chimeric material
ECTKIVGSCAKEDCATHCQSYAKGVAVLGSSCSYYNLCTCGSPSKRPPSPKNCIIGMGICNGDCQDECCNKRCVSRYSKTGSGNCVDAFGMILCLCSYDR

SEQ ID NO: 417 - protein, 96 aa, Artificial Sequence
  chimeric material
ECTKIVGSCAKEDCATHCQSYAKGVAVLGSSCSYYNLCTCAPKKVEPNCIIGMGICNGDCQDECCNKRCVSRYSKTGSGNCVDAFGMILCLCSYDR

SEQ ID NO: 418 - protein, 99 aa, Artificial Sequence
  chimeric material
ECTKIVGSCAKEDCATHCQSYAKGVAVLGSSCSYYNLCTCNNESASPASKNCIIGMGICNGDCQDECCNKRCVSRYSKTGSGNCVDAFGMILCLCSYDR

SEQ ID NO: 419 - protein, 101 aa, Artificial Sequence
  chimeric material
ECTKIVGSCAKEDCATHCQSYAKGVAVLGSSCSYYNLCTCGGKAGKKAPKRDNCIIGMGICNGDCQDECCNKRCVSRYSKTGSGNCVDAFGMILCLCSYDR

SEQ ID NO: 420 - protein, 99 aa, Artificial Sequence
  chimeric material
ECTKIVGSCAKEDCATHCQSYAKGVAVLGSSCSYYNLCTCGGKAGKKAPKNCIIGMGICNGDCQDECCNKRCVSRYSKTGSGNCVDAFGMILCLCSYDR

SEQ ID NO: 421 - protein, 99 aa, Artificial Sequence
  chimeric material
ECTKIVGSCAKEDCATHCQSYAKGVAVLGSSCSYYNLCTCGGKAGKDQITNCIIGMGICNGDCQDECCNKRCVSRYSKTGSGNCVDAFGMILCLCSYDR

SEQ ID NO: 422 - protein, 96 aa, Artificial Sequence
  chimeric material
ECTKIVGSCAKEDCATHCQSYAKGVAVLGSSCSYYNLCTCAGRGDKKNCIIGMGICNGDCQDECCNKRCVSRYSKTGSGNCVDAFGMILCLCSYDR

SEQ ID NO: 423 - protein, 111 aa, Artificial Sequence
  chimeric material
KLCQKRSTTWSGPCLNTGNCKRQCINVEHATFGACHRQGFGFACFCYKKCGPPSPTPPHHKKLCERRSKTWSGPCLISGNCKRQCINVEHATSGACHRQGIGFACFCKKKC

SEQ ID NO: 424 - protein, 110 aa, Artificial Sequence
  chimeric material
KLCQKRSTTWSGPCLNTGNCKRQCINVEHATFGACHRQGFGFACFCYKKCGPPSPPPYSKKLCERRSKTWSGPCLISGNCKRQCINVEHATSGACHRQGIGFACFCKKKC

SEQ ID NO: 425 - protein, 109 aa, Artificial Sequence
  chimeric material
KLCQKRSTTWSGPCLNTGNCKRQCINVEHATFGACHRQGFGFACFCYKKCEPPSLTPLNKLCERRSKTWSGPCLISGNCKRQCINVEHATSGACHRQGIGFACFCKKKC

SEQ ID NO: 426 - protein, 111 aa, Artificial Sequence
  chimeric material
KLCQKRSTTWSGPCLNTGNCKRQCINVEHATFGACHRQGFGFACFCYKKCEPPSLTSTPLNKLCERRSKTWSGPCLISGNCKRQCINVEHATSGACHRQGIGFACFCKKKC

SEQ ID NO: 427 - protein, 113 aa, Artificial Sequence
  chimeric material
KLCQKRSTTWSGPCLNTGNCKRQCINVEHATFGACHRQGFGFACFCYKKCTFDKPPPGLTPPGKLCERRSKTWSGPCLISGNCKRQCINVEHATSGACHRQGIGFACFCKKKC

SEQ ID NO: 428 - protein, 114 aa, Artificial Sequence
  chimeric material
KLCQKRSTTWSGPCLNTGNCKRQCINVEHATFGACHRQGFGFACFCYKKCFYNTPPPKTRGIRTKLCERRSKTWSGPCLISGNCKRQCINVEHATSGACHRQGIGFACFCKKKC

SEQ ID NO: 429 - protein, 111 aa, Artificial Sequence
  chimeric material
KLCQKRSTTWSGPCLNTGNCKRQCINVEHATFGACHRQGFGFACFCYKKCGSPSKRPPSPKKLCERRSKTWSGPCLISGNCKRQCINVEHATSGACHRQGIGFACFCKKKC

SEQ ID NO: 430 - protein, 110 aa, Artificial Sequence
  chimeric material
KLCQKRSTTWSGPCLNTGNCKRQCINVEHATFGACHRQGFGFACFCYKKCGGKAGKDQITKLCERRSKTWSGPCLISGNCKRQCINVEHATSGACHRQGIGFACFCKKKC

SEQ ID NO: 431 - protein, 107 aa, Artificial Sequence
  chimeric material
KLCQKRSTTWSGPCLNTGNCKRQCINVEHATFGACHRQGFGFACFCYKKCAGRGDKKKLCERRSKTWSGPCLISGNCKRQCINVEHATSGACHRQGIGFACFCKKKC

SEQ ID NO: 432 - protein, 96 aa, Artificial Sequence
  chimeric material
KPCNNNLGDCQQCDERCKAKHGPTCQGSCDNTFKQCICATPPTPTPPKICYSGAGLCTTKCWDECCNKTCASMYLNGVGYCDSIGHINLCKCQYPC

SEQ ID NO: 433 - protein, 97 aa, Artificial Sequence
  chimeric material
KPCNNNLGDCQQCDERCKAKHGPTCQGSCDNTFKQCICGPPSPTPPHHKICYSGAGLCTTKCWDECCNKTCASMYLNGVGYCDSIGHINLCKCQYPC

SEQ ID NO: 434 - protein, 95 aa, Artificial Sequence
  chimeric material
KPCNNNLGDCQQCDERCKAKHGPTCQGSCDNTFKQCICEPPSLTPLNICYSGAGLCTTKCWDECCNKTCASMYLNGVGYCDSIGHINLCKCQYPC

SEQ ID NO: 435 - protein, 97 aa, Artificial Sequence
  chimeric material
KPCNNNLGDCQQCDERCKAKHGPTCQGSCDNTFKQCICEPPSLTSTPLNICYSGAGLCTTKCWDECCNKTCASMYLNGVGYCDSIGHINLCKCQYPC

SEQ ID NO: 436 - protein, 99 aa, Artificial Sequence
  chimeric material
KPCNNNLGDCQQCDERCKAKHGPTCQGSCDNTFKQCICTFDKPPPGLTPPGICYSGAGLCTTKCWDECCNKTCASMYLNGVGYCDSIGHINLCKCQYPC

SEQ ID NO: 437 - protein, 100 aa, Artificial Sequence
  chimeric material
KPCNNNLGDCQQCDERCKAKHGPTCQGSCDNTFKQCICFYNTPPPKTRGIRTICYSGAGLCTTKCWDECCNKTCASMYLNGVGYCDSIGHINLCKCQYPC

SEQ ID NO: 438 - protein, 93 aa, Artificial Sequence
  chimeric material
KPCNNNLGDCQQCDERCKAKHGPTCQGSCDNTFKQCICAPKKVEPICYSGAGLCTTKCWDECCNKTCASMYLNGVGYCDSIGHINLCKCQYPC

SEQ ID NO: 439 - protein, 98 aa, Artificial Sequence
  chimeric material
KPCNNNLGDCQQCDERCKAKHGPTCQGSCDNTFKQCICGGKAGKKAPKRDICYSGAGLCTTKCWDECCNKTCASMYLNGVGYCDSIGHINLCKCQYPC

SEQ ID NO: 440 - protein, 96 aa, Artificial Sequence
  chimeric material
KPCNNNLGDCQQCDERCKAKHGPTCQGSCDNTFKQCICGGKAGKKAPKICYSGAGLCTTKCWDECCNKTCASMYLNGVGYCDSIGHINLCKCQYPC

SEQ ID NO: 441 - protein, 96 aa, Artificial Sequence
  chimeric material
KPCNNNLGDCQQCDERCKAKHGPTCQGSCDNTFKQCICGGKAGKDQITICYSGAGLCTTKCWDECCNKTCASMYLNGVGYCDSIGHINLCKCQYPC

SEQ ID NO: 442 - protein, 93 aa, Artificial Sequence
  chimeric material
KPCNNNLGDCQQCDERCKAKHGPTCQGSCDNTFKQCICAGRGDKKICYSGAGLCTTKCWDECCNKTCASMYLNGVGYCDSIGHINLCKCQYPC

SEQ ID NO: 443 - protein, 93 aa, Artificial Sequence
  chimeric material
KPCNNNLGDCQQCDERCKAKHGPTCQGSCDNTFKQCICASFKPAKICYSGAGLCTTKCWDECCNKTCASMYLNGVGYCDSIGHINLCKCQYPC

SEQ ID NO: 444 - protein, 102 aa, Artificial Sequence
  chimeric material
EKCSLFIAGCLDTPACDSYCKDQWSGGIGICSNERCICNFECATPPTPTPPKRDCNASTGPCSKECGDSCCNNKCASKYNQGVGYCRSLLPPLAMCQCVYAC

SEQ ID NO: 445 - protein, 104 aa, Artificial Sequence
  chimeric material
EKCSLFIAGCLDTPACDSYCKDQWSGGIGICSNERCICNFECTPPTPPSPPTRPRDCNASTGPCSKECGDSCCNNKCASKYNQGVGYCRSLLPPLAMCQCVYAC

SEQ ID NO: 446 - protein, 102 aa, Artificial Sequence
  chimeric material
EKCSLFIAGCLDTPACDSYCKDQWSGGIGICSNERCICNFECGPPSPPPYSKRDCNASTGPCSKECGDSCCNNKCASKYNQGVGYCRSLLPPLAMCQCVYAC

SEQ ID NO: 447 - protein, 103 aa, Artificial Sequence
  chimeric material
EKCSLFIAGCLDTPACDSYCKDQWSGGIGICSNERCICNFECEPPSLTSTPLNRDCNASTGPCSKECGDSCCNNKCASKYNQGVGYCRSLLPPLAMCQCVYAC

SEQ ID NO: 448 - protein, 106 aa, Artificial Sequence
  chimeric material
EKCSLFIAGCLDTPACDSYCKDQWSGGIGICSNERCICNFECFYNTPPPKTRGIRTRDCNASTGPCSKECGDSCCNNKCASKYNQGVGYCRSLLPPLAMCQCVYAC

SEQ ID NO: 449 - protein, 103 aa, Artificial Sequence
  chimeric material
EKCSLFIAGCLDTPACDSYCKDQWSGGIGICSNERCICNFECGSPSKRPPSPKRDCNASTGPCSKECGDSCCNNKCASKYNQGVGYCRSLLPPLAMCQCVYAC

SEQ ID NO: 450 - protein, 102 aa, Artificial Sequence
  chimeric material
EKCSLFIAGCLDTPACDSYCKDQWSGGIGICSNERCICNFECNNESASPASKRDCNASTGPCSKECGDSCCNNKCASKYNQGVGYCRSLLPPLAMCQCVYAC

SEQ ID NO: 451 - protein, 104 aa, Artificial Sequence
  chimeric material
EKCSLFIAGCLDTPACDSYCKDQWSGGIGICSNERCICNFECGGKAGKKAPKRDRDCNASTGPCSKECGDSCCNNKCASKYNQGVGYCRSLLPPLAMCQCVYAC

SEQ ID NO: 452 - protein, 102 aa, Artificial Sequence
  chimeric material
EKCSLFIAGCLDTPACDSYCKDQWSGGIGICSNERCICNFECGGKAGKDQITRDCNASTGPCSKECGDSCCNNKCASKYNQGVGYCRSLLPPLAMCQCVYAC

SEQ ID NO: 453 - protein, 99 aa, Artificial Sequence
  chimeric material
EKCSLFIAGCLDTPACDSYCKDQWSGGIGICSNERCICNFECAGRGDKKRDCNASTGPCSKECGDSCCNNKCASKYNQGVGYCRSLLPPLAMCQCVYAC

SEQ ID NO: 454 - protein, 99 aa, Artificial Sequence
  chimeric material
EKCSLFIAGCLDTPACDSYCKDQWSGGIGICSNERCICNFECASFKPAKRDCNASTGPCSKECGDSCCNNKCASKYNQGVGYCRSLLPPLAMCQCVYAC

SEQ ID NO: 455 - DNA, 126 bp, Arabidopsis lyrata
caaacatgtgacgacaaactaggctcttgtgaaaattgcgaccaaaggtgcaaggccaaacacggaccatcgtccgtaagcaaatgtaacggtccggatgggatgtgcaagtgcacctacgaatgt

SEQ ID NO: 456 - DNA, 171 bp, Arabidopsis thaliana
gttcattgccagtctacatccgctagcagtcctggttttgacaacggagaagtttgcaaacaattcaaattcaatccgtgtgaacgcggaggggatagaggctgcactgtgttttgtacaagaaagttgtttactcgaggcgaatgcagagacgagggatgttggtgttgt

SEQ ID NO: 457 - DNA, 132 bp, Arabidopsis thaliana
gattcatgcgatgaaagtctaggcctttgcgaaacatgtgacgaaagatgccaggccaaacacgggccatcgtgcataagcaaatgtgacggagaggttgggatgttgtcgtgcacgtgcacttacgagtgt

SEQ ID NO: 458 - DNA, 114 bp, Arabidopsis thaliana
cagacatgtgacgagaacctaagctcttgtgaaaattgcgaccaaaggtgcaaggccaaacacggaccatcgtccgtaagcaaatgtaacggtccggatgggacgtgcggatgt

SEQ ID NO: 459 - DNA, 126 bp, Arabidopsis thaliana
aatacatgcatcgagggtattggtaattgtcagcaatgtgacgtgagatgcaaggccagacacggaccagcggccaaaggcgcttgtgactccaaatttcaactatgcacgtgcaattacccttgc

SEQ ID NO: 460 - DNA, 132 bp, Arabidopsis thaliana
agtatctgtaacgacagactaggcctttgcgatggttgcgatcaaagatgtaaggccaaacacgggccatcgtgcgaaagtaaatgtgacgggccggttggaatgttgctgtgcacgtgcacttacgagtgt

SEQ ID NO: 461 - DNA, 141 bp, Bassia scoparia
gaggattggtgcgaaaaaggactaggaatatgtggaccgggaacggattgtgaggacaagtgtaagcaattggatccgagttacgtagggatttgtaatcgcgaaatcaggcctccggtgtgtagctgccactacccctgt

SEQ ID NO: 462 - DNA, 129 bp, Brassica napus
aaatgtgccgacggactaggcacttgtgaaaactgcgacgagagatgcaaggccaaacacgggccatcaagtgaaagcatctgtgaccgctctcttgggatgcctctgtgcatgtgctactatcaatgt

SEQ ID NO: 463 - DNA, 132 bp, Brassica napus
aatttgtgcagagatggtctaggcacttgtgaagactgcgaccagaaatgtaaaactaagcacggaccatcaagcgaaagcagctgcgaccgtagtgttggagtggcactatgcacgtgcttttaccaatgt

SEQ ID NO: 464 - DNA, 126 bp, Brassica napus
aactcatgccaagaccctctaggtagttgtctacaatgtgatgagagatgcaaggctaagcacgggccaacgggccaagcaagttgcgacagtcgaaaccaactatgcacgtgctattacacgtgc

SEQ ID NO: 465 - DNA, 132 bp, Brassica napus
gatatgtgcgtcgatgtactagacacttgcgaatactgcgaccagagatgcaagtccaaacacgggccatcaggccaaggagactgtgaaagctctactggaatgcctatgtgtaggtgccactaccaatgt

SEQ ID NO: 466 - DNA, 135 bp, Brassica napus
aatatatgcgtcgatggactaggcacttgcgaaatctgcgaccagagatgcaagtccaaacacgggccatcaggccacggagactgtgatgaccgctctactggggtgcctatgtgcaggtgccactaccaatgt

SEQ ID NO: 467 - DNA, 132 bp, Brassica napus
gatatgtgcgtcgatggactatacacttgcgactactgcgagcagagatgcaagtccaaacacgggccatcaggccaaggagaatgtgaaacccatactgggatgcctatgtgcatgtgccactaccaatgt

SEQ ID NO: 468 - DNA, 114 bp, Brassica napus
aaaccttgcaacaacaatttaggtgattgtcaacaatgtgatgagaggtgcaaagctaagcacggaccaacgtgtcaaggtagttgtgacaacacttttaaacaatgcatctgt

SEQ ID NO: 469 - DNA, 114 bp, Brassica napus
aaaccttgcaacaacaatttaggtgattgtcaacagtgtgatgagaggtgcaaaactaagtatggaccaacgtgtcaaggtagttgtgacaacacttgtaaacaatgcctctgt

SEQ ID NO: 470 - DNA, 135 bp, Brasicca Rapa
atctcttgtgcaacgatggtgagcattccgacagtggaagctcaggtttttcttccttgcaaaacagctaaagattgtgaataccttcattgctcgagtgggacaggtcagtgcgtaaagagtcagtgtcaatgt

SEQ ID NO: 471 - DNA, 120 bp, Brasicca Rapa
ggaacatgcgttgagactgaaggcccttgtgagaactgtgaccagaaatgcctggccaaattcggaccatcagttaacacccaatgtgggaattcgcagtgcttatgcatctacgagtgc

SEQ ID NO: 472 - DNA, 147 bp, Carica papaya
gtactatgtctactgcataatgtcaaggcccgaacaagccaatcagaagaatcattttcgacagagacacgctgcaaacgagatattgaatgtatgtcgtgtccacatggtggattctgtgacatgaagaccggaaaatgttcttgc

SEQ ID NO: 473 - DNA, 144 bp, Carica papaya
aatatatgtataactgtagcaggaagtttgaagaatatttccggcgatgcggatatatgttccgagccgttaggatattgcggcaacgactgcgagtcaaggtgtctggctagacacattggcgtcgagactcaaggatcatgc

SEQ ID NO: 474 - DNA, 123 bp, Carica papaya
gaaatctgttcggatgatttgggatactgcgataatatttgcgattcaaactgcaaatcgattcatccgaaaggcaatggaacttgtgtagaggatgaggcttcggtgatggtgtgtaggtgt

SEQ ID NO: 475 - DNA, 117 bp, Citrus clementina
aaaatatgcattgaagattttgggacgccttgtagtgaaggtagttgcgagagaacatgcgaatcaaaacatgcaaatggattaggggattgtgatgttgatgagagctgcaaatgc

SEQ ID NO: 476 - DNA, 129 bp, Citrus clementina
aaaatatgtattgaagattttgggccaaattgcagtggaggtgattgcgagacgaagtgcgaatcaaagcacaaaaatggattgggggactgtgacgttggtgagagctgtaaatgctactatgattgt

SEQ ID NO: 477 - DNA, 135 bp, Citrus clementina
caaatatgtagtgaaaattatggctcatgtgatggccgtacgactcctgattgcaataaattttgcgcatcaaaccgtccccgtggcaatggatcttgtgatgccactgattattgcagatgcttttatccttgt

SEQ ID NO: 478 - DNA, 141 bp, Citrus clementina
gatacgtgccaagaaggcttgggtcaatgtggcgctagcaatgactgtgatttacaatgtaaaactaggcacgctggtcaaggccaaggctcttgcgaccgcaccattcagcctccattgtgcacatgcttttacccttgt

SEQ ID NO: 479 - DNA, 123 bp, Citrus sinensis
caaatatgttgtgaaaattatggctcatgtgatggccgtacgactcctgattgcaatacattttgcgcatcaaaccgtccccgtggcaatggatcttgtgatgccactgattattgcagatgc

SEQ ID NO: 480 - DNA, 141 bp, Citrus sinensis
gatacgtgccaagaaggcttgggtcaatgtggcgccagcaatgattgtgatttacattgtaaaactaggcacgctggtcaaggccaaggctcttgcgaccgcaccattcagcctccattgtgcacatgcttttacccttgt

SEQ ID NO: 481 - DNA, 144 bp, Cucumis melo
aacatatgcagcgaagggttaggaccatgtggaaccaactgcgatgcaaggtgcaaagccaagcatagccctatagagaaccctcagggcagctgtgatcaaatcgggagcaacttatcgttgtgttactgcctttacacttgt

SEQ ID NO: 482 - DNA, 144 bp, Cucumis sativus
gacatatgcaccgaagggttaggaccatgtggaaccaactgcgatgcaaggtgcaaagctcagcatagccctaacgagaaccctcagggtagctgtgatcaaatcggtagcagcatatcgttgtgtaattgcctttacagttgt

SEQ ID NO: 483 - DNA, 126 bp, Glycine max
tataaatgtttgacagatatgggtttatgtgatgaacgtatcacctcgagtgagtgtgatcttagatgtaaatcccattataatgatggagaggggcactgtgataacatgaacatctgtaattgt

SEQ ID NO: 484 - DNA, 126 bp, Glycine max
aacacatgttcacaaccattgggtggatgtggtcctatgggacaatgtgaccagagatgtaaagctctacacattgatggacaaggatcttgtgacttaggcttgtgcacttgctactacggttgt

SEQ ID NO: 485 - DNA, 132 bp, Malus domestica
gacgtttgcaccgaagatatgggtgcatgcgatcctgactgcagttcaaggtgcacatctgcacatcctggggctaaggccggttgtgatttgaacaacaacaacccggtttgcagatgcttctacgactgt

SEQ ID NO: 486 - DNA, 150 bp, Medicago truncatula
aaactttgtcaaaagcgaagtacaacatggtcaggaccttgtcttaacacaggaaactgcaaaagacaatgcattaatgtggagcatgctacttttggtgcttgtcatcgtcaaggctttggttttgcttgcttctgctacaaaaaatgt

SEQ ID NO: 487 - DNA, 120 bp, Medicago truncatula
gaatgcacaaaaattgttggtagttgtgcaaaagaagattgtgcaactcattgtcaatcatatgcaaaaggtgttgctgttttaggatcatcatgttcatactacaacttatgcacttgt

SEQ ID NO: 488 - DNA, 126 bp, Medicago truncatula
gaaaaatgctcactatttattgctggttgtcttgacacaccagcatgtgattcttattgtaaagatcagtggagtggtggaattgggatttgtagcaatgaaagatgcatttgtaatttcgaatgt

SEQ ID NO: 489 - DNA, 36 bp, Medicago truncatula
tgtagcaatgaaagatgcatttgtaatttcgaatgt

SEQ ID NO: 490 - DNA, 129 bp, Medicago truncatula
tcagaaacgtgctcacaatttattgctggttgtcttgacacaccatcatgtgattcttattgcaaagagcagtatagtgatggaaatggaatttgtgccaatgaaagatgcatttgtaatttcacttgt

SEQ ID NO: 491 - DNA, 108 bp, Medicago truncatula
tgctcaagaattgtgggtaactgtggagcaatggattgcctcaaatattgtaataaccttccaggaagtccaaccggatcatgtcgttacttcaacttatgcacttgt

SEQ ID NO: 492 - DNA, 129 bp, Medicago truncatula
gaaacatgcacacaaaactttaggccttttgttgacacaccaagttgtgacaattattgtaaagggcagtggagtgatggaaatgggatttgtgagtcaggaggactatgcatttgtaagttcccttgt

SEQ ID NO: 493 - DNA, 165 bp, Portulaca oleracea
tgtttgacaagttgtagagcaacaaggaggaatgatctaaacccagaaggaagcggggtttgccttcctcttcaaccaagttgtacaccagaagcatgccaaaactcttgcggaggatcaaaaggagcttgtcttcgtcgtgcctctgacattgtatgttgttgt

SEQ ID NO: 494 - DNA, 165 bp, Portulaca oleracea
tgtttgacaagatgtaaagcaacaaggaggaatgatctaaagccagaaggaagcggggtttgccttcctcttcaaccgagttgtacagcagaagcatgccaaaactcttgcggaggatcaaaaggagcttgtcttcgtcgtggctctgacattgtatgttgttgt

SEQ ID NO: 495 - DNA, 132 bp, Portulaca oleracea
aaaacttgcgaagaagggatgggaatttgcgggacggactgtaaagacagatgtgcacagagacacccgggtggtgaaggatcatgtaatcatctaatatcgcctcctctatgtacttgttattatcaatgt

SEQ ID NO: 496 - DNA, 183 bp, Prunus persica
tcttcttgcatcatcattgttctccttgtcttcactgcagggaccctaatgcccatggtgaaaggtgacgtttgcacagaagacgtaggtacatgtggtgatgactgcagttcaaggtgcgcatctgcacatcctggggcgaaggctgcctgcgttttgaacaacatcccagtttgtagatgc

SEQ ID NO: 497 - DNA, 132 bp, Raphanus raphanistrum
aacacctgtaccgatggactaggcacttgtgaaaactgtgaccagagatgcaaggccaaacacgggccatcaagtgaaagcaactgtgaccactctcttgtgatgcctctgtgcctatgctactatcaatgt

SEQ ID NO: 498 - DNA, 135 bp, Raphanus raphanistrum
aatatatgcgtcgatggactaggcacttgcgaaagctgcgaccagagatgcaagtccaaacatgggccatcaagccaaggtgactgtgatgaccgctctattggggggcctctgtgcaggtgccactaccaatgt

SEQ ID NO: 499 - DNA, 138 bp, Raphanus raphanistrum
caagggaatttgtgcagagatggtctaggcacttgtgaaaactgcgacctgaaatgtaaaactaagcacggtccatcaagcgaaagcaactgcgaccatagtgttggagtggcattatgcacgtgcttttaccaatgt

SEQ ID NO: 500 - DNA, 123 bp, Raphanus raphanistrum
gccacgtgccaagaccctctaggtagttgtctacagtgtgatgagagatgcaaagctaagcacggaccaacgggccaagcgagttgcgacagaaaccaactatgcacgtgctattacacgtgc

SEQ ID NO: 501 - DNA, 123 bp, Raphanus raphanistrum
gccacatgccaagaccctctaggtagttgtctacagtgtgatgagagatgcaaagctaagcacggaccgacgggccaagcaagttgcgacagaaaccaactatgcacgtgctattacacgtgc

SEQ ID NO: 502 - DNA, 126 bp, Rosa blanda
gaaatatgcaacgaatcgatcggttcttgtcaaggcatcgactgcaaccaagtctgcgtcaacaaacatcccggtggctccggcacatgtgatcaaacaaacacatgcaattgctatttcgactgt

SEQ ID NO: 503 - DNA, 120 bp, Trifolium repens
gaatgcacaaaagttgtgggtaattgtgctgcatcagattgttcttcacattgtaattcatatgcaagaggtgctcgtgttttaggatcatcatgttcattcaacaacttatgcacttgt

SEQ ID NO: 504 - DNA, 96 bp, Zea mays
tgtgaccccgacgtgtgtgccaagagctgcgtcaagggattgaacaacggcaacggcacctgcgtgaggccgcttggatgtgattgcgtgttctgc

SEQ ID NO: 505 - DNA, 150 bp, Zea mays
tcgtccgccggatgcccgcatccccgttcgatgatcctgtacccagacctgccctgtgatcccgacgtgtgcgccaagagctgcgccaagggattgaacaacggcaacggcacctgcatgaggccgcttggatgtgattgcgagtactgc

SEQ ID NO: 506 - DNA, 144 bp, Arabidopsis lyrata
gtgtgcgtcggtgcgactgatatgtgcactgacacttgtcctcagagttgttgtgatagacaatgcgcaataaaatataagaatggacatgggggttgtgtcaactatgctggttataggatgtgcatatgcgagtactcttgc

SEQ ID NO: 507 - DNA, 129 bp, Arabidopsis thaliana
tgccaaggtttcaaattcaatccgtgtgaacgcggaggggatagaggctgcactgtgttttgtaaaagaaaattggttactcgaggcgaatgcagagacgagggatgttggtgttgtcctggacaagta

SEQ ID NO: 508 - DNA, 141 bp, Arabidopsis thaliana
tgcagcggtgggactggtatgtgcagtggaaagtgtccatataaatgttgtgataccagttgcgcacaaaagtataatggtggacgtggattttgtaactcctttggtaattataatttttgccaatgcgaatacccttgc

SEQ ID NO: 509 - DNA, 141 bp, Arabidopsis thaliana
tgcatcggtgcgactgatatgtgcactgataaatgtcctacaagttgttgtgatagacaatgcgctataaaatataagaatggaaaagggggttgtgtcgactatgctggttataggatgtgcatttgcgagtacacttgc

SEQ ID NO: 510 - DNA, 120 bp, Arabidopsis thaliana
tgcagcgatagatgtggggctcagtgttgcaaccaaaactgtgcgcaaaagtataatcaaggaagtggattttgtgacagcattggcaatacttctttgtgtaaatgccaatataattgc

SEQ ID NO: 511 - DNA, 141 bp, Arabidopsis thaliana
tgcaatggtgggcttggcaattgcggtgaaagttgtaatgaacaatgttgtgataggaattgtgcacaaagatacaatggtggacatggatattgtaacacccttgatgattttagtttgtgcttatgcaagtacccttgc

SEQ ID NO: 512 - DNA, 162 bp, Bassia scoparia
aaaaaatgcaccgataatggcggggtatgcagtgaaaaatgcgacgacgggtgttgtttggctaattgtaagaacaagttccctagtaaagatgaggtctctgggtcatgtcaagacggtgtagggacttccattagattgtgtttatgtgagtatgattgt

SEQ ID NO: 513 - DNA, 144 bp, Brassica napus
atttgcaatggtggagctggtttatgtagtgcaaggtgtctcggaagttgttgtgatactaactgcgcacaaaagtttaacggtggacatggattttgtagcaccctcggtacttttagtttgtgccaatgtcagtatccttgt

SEQ ID NO: 514 - DNA, 144 bp, Brassica napus
acttgcaacagtggaactactctatgcactgaacagtgctcggacagttgctgtgacacgaactgcgcacaatcgcatgacggtggacatggaatttgtaattccattggtaacactcgtctttgtttgtgtgagtacccttgc

SEQ ID NO: 515 - DNA, 129 bp, Brassica napus
caatgctacggtgggactggcttgtgcagcagtgcatgcaatcaaaactgtgcacaaaagtatcttggtggatctggattttgtgagagcattggcatctctagactgtgcaaatgccagtatccttgc

SEQ ID NO: 516 - DNA, 144 bp, Brassica napus
acttgcaatggtggggccggtttatgtagtgtaaggtgtccccaaaaatgttgcgatattaactgtgcacttaagtttataggtggaagtgggatgtgtttcaccgtcggtaatactagtgtttgccagtgcaagtatccttgt

SEQ ID NO: 517 - DNA, 144 bp, Brassica napus
acttgcaatggtggggccggtttatgtagtgtaaattgtccccaaaaatgttgcgatattaactgtgcacttaagtttataggtggaagtgggatgtgtttaaccctcggtaatactagcgtttgccagtgcaagtatccttgt

SEQ ID NO: 518 - DNA, 144 bp, Brassica napus
acttgcaatggtggggccggtttatgtagtgtaaggtgtccccaaaaatgttgcgatgtaaactgtgcacttaagtttacaggtggaagtgggatgtgtttcaccctcggtaatactagtgtttgccagtgcaagtatccttgt

SEQ ID NO: 519 - DNA, 144 bp, Brassica napus
atatgctatagcggagctggcctgtgcaccacaaaatgttgggacgaatgttgcaacaaaacttgtgctagcatgtatttgaacggagttggatattgcgacagcattggccatattaatctatgcaaatgtcagtatccttgc

SEQ ID NO: 520 - DNA, 144 bp, Brassica napus
atatgctatagcggagctggcctgtgcaccccaaaatgttgggacgaatgttgcaacaaaacttgtgctagcatgtatttgaatggagttggatattgcgacagcattggccatattaatctatgcaagtgtcagtatccttgc

SEQ ID NO: 521 - DNA, 93 bp, Brasicca Rapa
tgcaaggtgacgagtgattgtgaccctagtatgaaaccttcatgtgtttcgggatcttatatgtgtttcaatggcttctgtacgtgtactcat

SEQ ID NO: 522 - DNA, 141 bp, Brasicca Rapa
tgcaacggtggggctggtctctgttctcagaattgtcctgaaaaatgctgtgatacgaattgtgcaacaaagtttaatggtggacatggatcttgtgtcacgcttggtaattttagtttgtgccaatgtgagtacccttgt

SEQ ID NO: 523 - DNA, 186 bp, Carica papaya
tgtgagagagatgttgattgtatgggagcgtgtccacatggtggattctgtgatatgaagaatggaaaatgttcttgtttgccattatcgacacaggcacgctgtaaaagagatgttgattgtatgggagcatgtccacatggtggattttgtgacatgaaaaatggaagatgttcttgcttacca

SEQ ID NO: 524 - DNA, 189 bp, Carica papaya
tgcacctgctactacagctgtaatttgcagccaccgccacctgagacctgcaatgatggccttggctattgtactgtggcctgcgaagaggattgttgcaatagaaaatgtagcgaaaagcattatcagggacgaggtttatgcaacgagattggtacaattaaactctgtcaatgccagtatccatgt

SEQ ID NO: 525 - DNA, 183 bp, Carica papaya
tgcttatctcctcctccacgtcgtcgatgtaatgtaggaatcgatagatgtactgcagcttgtaatgagaagtgctgcgacgaaaactgcatgtctaaatttccagaacatctgaactgccatggatcctgctccgatcttttaccgccacaatttagtgtttgcatttgtgcttatgactgt

SEQ ID NO: 526 - DNA, 186 bp, Citrus clementina
tgtgaagccaatccctctagaaaattatgcaaggaagatctgggtttgtaccctcgtggctgcactgctcaacaatgtcaaaatgattgtgcaaataaattccctggatctaaagacaatgtccatggatactgctacggccctgacatttatcctgatcaatcctgtcgttgcgcctatttttgt

SEQ ID NO: 527 - DNA, 183 bp, Citrus clementina
tgcaagtctgatctgggtttgtaccctcgtggctgcgctgctcaacaatgtcaaaaagattgtgaaaatgaattccatggatattctaaagaagatgtccatggatattgctacggccatgacatttatccagatcaatcttgtcgttgcgcctatttttgtccttcttttaagcacaatggt

SEQ ID NO: 528 - DNA, 162 bp, Citrus clementina
ctctgcaaatattatgtcggtccaaaccctcagggcgggtgcagtgacgaagattgtgactcaacatgtagccaaaaattccccggatctgatcaagatggccatggattatgccaggccgttgagtatcctaatcttgcttgttattgcatccatttgtgt

SEQ ID NO: 529 - DNA, 141 bp, Citrus clementina
aagtgcaccgccggtttaggtgcatgtgatcagtgccgcgacctatgttgcaacggcaagtgtgcggctcagtttaaaggtggtcaaggattttgtgataatattggtgcccaatatttgtgtcaatgtacatatgattgc

SEQ ID NO: 530 - DNA, 186 bp, Citrus sinensis
tgtgctggtcgtggtgataaaaaactctgcaaatattatgtcggtccaaaccctcagggcgggtgcagtgacgaagattgtgactcaacatgtagccaaaaattccccggatatgatcaagatggccatggattatgccaggccgttgagtatcctaatcttgcttgttattgcatccatttgtgt

SEQ ID NO: 531 - DNA, 144 bp, Citrus sinensis
aaaaagtgcaccgccggtttaggtgcatgtgatcagtgccgcgacctatgttgcaacggcaagtgtgcggctcagtttaaaggtggtcaaggattttgtgataatattggtgcccaatatttgtgtcaatgtacatatgattgc

SEQ ID NO: 532 - DNA, 141 bp, Cucumis melo
tgcatctccggactagggttgtgcactggacaatgcaagagcgattgttgtaatgctaaatgtaggaggcagtaccaaggaggggaggggtattgtgacacaaacgttggagttcctttgtgccaatgcagccacccttgc

SEQ ID NO: 533 - DNA, 141 bp, Cucumis sativus
tgcatctccggactagggttgtgcactgcacaatgcaagagcgattgttgtaatgctaaatgtgggcagcagtacaaaggaggagaggggttttgtgacacaaacgttggagtttctttgtgccaatgcagccatccttgc

SEQ ID NO: 534 - DNA, 195 bp, Glycine max
tgtgtctctcctcagccaaataaagacaccgagcctataaggaagtgcacaagtggccttggactttgcagtattgatcactgctatgatgattgttgcaattcaaaatgtgctaaacaattcaaagagggtataggacattgtgaaattgtgggttcgatgggtaccatcttatgtacctgtgattatgtctgc

SEQ ID NO: 535 - DNA, 144 bp, Glycine max
tgcaataatggtcttggggtttgcactcttcagtgtggtgatgcatgctgtaatgcaaattgtgcaagaaaatataatcagggaacagggatgtgtagcaccattggtaacaacaacttatgtacttgccaatatagatgtggc

SEQ ID NO: 536 - DNA, 159 bp, Malus domestica
aagtgcaaaatcagcttgggaatatggggtgagaactgctcagagagtgattgtaactcacagtgtgcttccaaatatcctggacctcaagaaggaagtggatactgttatagcgttggagctcctttctatacttcttgtttttgtgagtacaagtgt

SEQ ID NO: 537 - DNA, 150 bp, Medicago truncatula
aaactttgtgaaaggcgaagcaaaacatggtcaggaccttgtcttatctcaggaaattgtaaaagacagtgcatcaatgttgagcatgcaacttctggtgcttgtcaccgtcaaggcattggttttgcttgcttctgcaagaaaaaatgt

SEQ ID NO: 538 - DNA, 147 bp, Medicago truncatula
aattgtattattgggatgggaatttgcaatggtgactgtcaagatgaatgttgcaacaaaaggtgtgttagtcgatatagtaaaacgggttctgggaattgtgtcgatgcctttggtatgattctttgtctttgttcctatgatcgt

SEQ ID NO: 539 - DNA, 150 bp, Medicago truncatula
agggattgtaatgcttctactggtccttgctctaaggagtgtggtgattcttgttgcaataacaaatgtgctagtaaatacaatcaaggtgtaggatattgtagatctcttctaccacctcttgctatgtgtcaatgcgtctatgcatgt

SEQ ID NO: 540 - DNA, 144 bp, Medicago truncatula
tgtaatgcttctactggtccttgctctaaggagtgtggtgattcttgttgcaataacaaatgtgctagtaaatacaatataggtgtaggatattgtagatctcttttcctacctcttgctatgtgtcaatgcgtctatgcatgt

SEQ ID NO: 541 - DNA, 153 bp, Medicago truncatula
aaaagggattgtgaggttaatcttggtttttgtgataacggtggtagccctagttgcaatgacaaatgttctagtagataccaagctggtactgggtattgtgatgctagtattgacccacgttttgctacatgtacctgcctatatgtttgt

SEQ ID NO: 542 - DNA, 159 bp, Medicago truncatula
tgcagtgttggatttggcctttgcgaaaattgtgatctaaactgttgcaatgaaaattgcgttaactattacgcacatgaatacaaaaatattaaagggaaatgtcttcatatccttgaccctgatccaacctattgcatttgtttgtatgaccctaaa

SEQ ID NO: 543 - DNA, 147 bp, Medicago truncatula
aggaaatgcagtgtttcaactggtttttgcaacgacggtgcatcggcttgcaattcagaatgtggtaatcgatactatgcagggatagggtattgtgatggtagtatttacccacaaattcctatttgttactgccaatatgtttgt

SEQ ID NO: 544 - DNA, 105 bp, Portulaca oleracea
ggaatttgctttcctcagcctaactgtaagccagatgtttgccaaaaatcttgtggcgcatccaaaggtgcttgtcttcaaggcggtactcaatgttgttgcgca

SEQ ID NO: 545 - DNA, 105 bp, Portulaca oleracea
ggaatttgctttccccagcctaactgtaagccagatgtttgccaaaaatcatgtggcgcatccaaaggggcttgtcttcaaggcgctactcaatgttgttgcgca

SEQ ID NO: 546 - DNA, 150 bp, Portulaca oleracea
aaacggtgtaccattggccttggactttgtggcatagaatcttgctttaacgagtgctgtaactccaagtgcaatgcccaacaccctggaggagaaggctattgtgttaatgcagcgggtacatggttgtgtcaatgtgaatataattgt

SEQ ID NO: 547 - DNA, 192 bp, Prunus persica
tgtggacctccagtcccaccgccatactcaaaaacttgcaaattaagcttgggaatatggggtgagaggtgctctgagaaggactgcaactcacagtgtgctgccaaatatcctggaccccaacaaggaatgggatactgttatagtgttggagctcctgtttatacttcttgtttttgtcaatacaagtgt

SEQ ID NO: 548 - DNA, 147 bp, Raphanus raphanistrum
aagatttgcaatggtggagctggtatatgtagtagaagctgtcccgaaacttgttgtaatactaactgcgcacaaaagtttaatggtggacatggattttgtagcaccctcggtaattttaacttgtgccaatgtcaatacccttgt

SEQ ID NO: 549 - DNA, 147 bp, Raphanus raphanistrum
gatacttgcaatggtggggccggtttatgtagtgtaaggtgtccccaaaaatgttgcgatattaactgtgcacttaagtatgcaggtggaagtgggatgtgttacaccctcggtaattctagtgtttgccaatgcaagtatccttgt

SEQ ID NO: 550 - DNA, 147 bp, Raphanus raphanistrum
aaaacttgcaacagtggaactactctatgcactgaacagtgttcggacaattgctgtgacacgaactgcgcaaagtcgcatgtcggtggacatggaatttgtaattccattggtaatacccgtctttgtttgtgtgagtacccttgc

SEQ ID NO: 551 - DNA, 132 bp, Raphanus raphanistrum
aaacaatgctatggtggggctggcttatgcagcagtgcatgcaatcaaaactgtgctcaaaagtatcctggtggatcaggattttgtgagagcattggcagcactagattgtgcaaatgccaatatccttgc

SEQ ID NO: 552 - DNA, 132 bp, Raphanus raphanistrum
aaacaatgctatggtggggctggcttgtgcagcagtgcatgcaatcaaaactgtgctcaaaagtatcctggtggatctggattttgtgagagcattggcagcactagattatgcaaatgccaatatccttgc

SEQ ID NO: 553 - DNA, 147 bp, Rosa blanda
aagacatgcaatgccggcttgggttattgcagtgccagttgtaatgaccagtgttgtgctcaaaactgtgcaagcaaatataaagatggagttggatactgtgacaccctaggctggacatcgttgtgtcaatgcaagtatagctgt

SEQ ID NO: 554 - DNA, 147 bp, Trifolium repens
gcttgtgatgttgggatgggaatttgcactagggattgtcaagatgattgttgcaacaacaagtgtgttagtagatttaggaatactggtcatgggagttgtgttgatgcttttaacatgattctttgtctttgttcctataaacgt

SEQ ID NO: 555 - DNA, 138 bp, Zea mays
tgcccggacccggagtcggtaacactgtatccaggcaagccctgcaatcgccagcagtgcaagacggactgcgccagcaagtaccacggcggcgtcggcgtctgcctcaaccccaaaggatgttactgcgagtactgc

SEQ ID NO: 556 - DNA, 138 bp, Zea mays
tgcccgcacccccgttcgacgatcctgtacccagacctgccatgcgatcccgacgtgtgtgccaagagttgcgccaagggattgaacaacggcaacggcacctgcatgaggccgattggatgtgattgcgtgttctgc

SEQ ID NO: 557 - DNA, 138 bp, Zea mays
tgcccgcacccccgttcgacgatcctgtacccagacctgccatgcgatcccgacgtgtgtgccaagagttgcgccaagggattgaacaacggcaacggcacctgcgtgaggccgattggatgtgattgcgtgttctgc

SEQ ID NO: 558 - DNA, 138 bp, Zea mays
tgcccgcacccccgttcgacgatcctgtacccagacctgccctgcgatcccgacgtgtgtgccaagagttgcgccaagggattgaacaacggcaacggcacctgcgtgaggccgattggatgtgattgcgtgttctgc

SEQ ID NO: 559 - protein, 42 aa, Arabidopsis lyrata
QTCDDKLGSCENCDQRCKAKHGPSSVSKCNGPDGMCKCTYEC

SEQ ID NO: 560 - protein, 57 aa, Arabidopsis thaliana
VHCQSTSASSPGFDNGEVCKQFKFNPCERGGDRGCTVFCTRKLFTRGECRDEGCWCC

SEQ ID NO: 561 - protein, 44 aa, Arabidopsis thaliana
DSCDESLGLCETCDERCQAKHGPSCISKCDGEVGMLSCTCTYEC

SEQ ID NO: 562 - protein, 38 aa, Arabidopsis thaliana
QTCDENLSSCENCDQRCKAKHGPSSVSKCNGPDGTCGC

SEQ ID NO: 563 - protein, 42 aa, Arabidopsis thaliana
NTCIEGIGNCQQCDVRCKARHGPAAKGACDSKFQLCTCNYPC

SEQ ID NO: 564 - protein, 44 aa, Arabidopsis thaliana
SICNDRLGLCDGCDQRCKAKHGPSCESKCDGPVGMLLCTCTYEC

SEQ ID NO: 565 - protein, 47 aa, Bassia scoparia
EDWCEKGLGICGPGTDCEDKCKQLDPSYVGICNREIRPPVCSCHYPC

SEQ ID NO: 566 - protein, 43 aa, Brassica napus
KCADGLGTCENCDERCKAKHGPSSESICDRSLGMPLCMCYYQC

SEQ ID NO: 567 - protein, 44 aa, Brassica napus
NLCRDGLGTCEDCDQKCKTKHGPSSESSCDRSVGVALCTCFYQC

SEQ ID NO: 568 - protein, 42 aa, Brassica napus
NSCQDPLGSCLQCDERCKAKHGPTGQASCDSRNQLCTCYYTC

SEQ ID NO: 569 - protein, 44 aa, Brassica napus
DMCVDVLDTCEYCDQRCKSKHGPSGQGDCESSTGMPMCRCHYQC

SEQ ID NO: 570 - protein, 45 aa, Brassica napus
NICVDGLGTCEICDQRCKSKHGPSGHGDCDDRSTGVPMCRCHYQC

SEQ ID NO: 571 - protein, 44 aa, Brassica napus
DMCVDGLYTCDYCEQRCKSKHGPSGQGECETHTGMPMCMCHYQC

SEQ ID NO: 572 - protein, 38 aa, Brassica napus
KPCNNNLGDCQQCDERCKAKHGPTCQGSCDNTFKQCIC

SEQ ID NO: 573 - protein, 38 aa, Brassica napus
KPCNNNLGDCQQCDERCKTKYGPTCQGSCDNTCKQCLC

SEQ ID NO: 574 - protein, 45 aa, Brasicca Rapa
ISCATMVSIPTVEAQVFLPCKTAKDCEYLHCSSGTGQCVKSQCQC

SEQ ID NO: 575 - protein, 40 aa, Brasicca Rapa
GTCVETEGPCENCDQKCLAKFGPSVNTQCGNSQCLCIYEC

SEQ ID NO: 576 - protein, 49 aa, Carica papaya
VLCLLHNVKARTSQSEESFSTETRCKRDIECMSCPHGGFCDMKTGKCSC

SEQ ID NO: 577 - protein, 48 aa, Carica papaya
NICITVAGSLKNISGDADICSEPLGYCGNDCESRCLARHIGVETQGSC

SEQ ID NO: 578 - protein, 41 aa, Carica papaya
EICSDDLGYCDNICDSNCKSIHPKGNGTCVEDEASVMVCRC

SEQ ID NO: 579 - protein, 39 aa, Citrus clementina
KICIEDFGTPCSEGSCERTCESKHANGLGDCDVDESCKC

SEQ ID NO: 580 - protein, 43 aa, Citrus clementina
KICIEDFGPNCSGGDCETKCESKHKNGLGDCDVGESCKCYYDC

SEQ ID NO: 581 - protein, 45 aa, Citrus clementina
QICSENYGSCDGRTTPDCNKFCASNRPRGNGSCDATDYCRCFYPC

SEQ ID NO: 582 - protein, 47 aa, Citrus clementina
DTCQEGLGQCGASNDCDLQCKTRHAGQGQGSCDRTIQPPLCTCFYPC

SEQ ID NO: 583 - protein, 41 aa, Citrus sinensis
QICCENYGSCDGRTTPDCNTFCASNRPRGNGSCDATDYCRC

SEQ ID NO: 584 - protein, 47 aa, Citrus sinensis
DTCQEGLGQCGASNDCDLHCKTRHAGQGQGSCDRTIQPPLCTCFYPC

SEQ ID NO: 585 - protein, 48 aa, Cucumis melo
NICSEGLGPCGTNCDARCKAKHSPIENPQGSCDQIGSNLSLCYCLYTC

SEQ ID NO: 586 - protein, 48 aa, Cucumis sativus
DICTEGLGPCGTNCDARCKAQHSPNENPQGSCDQIGSSISLCNCLYSC

SEQ ID NO: 587 - protein, 42 aa, Glycine max
YKCLTDMGLCDERITSSECDLRCKSHYNDGEGHCDNMNICNC

SEQ ID NO: 588 - protein, 42 aa, Glycine max
NTCSQPLGGCGPMGQCDQRCKALHIDGQGSCDLGLCTCYYGC

SEQ ID NO: 589 - protein, 44 aa, Malus domestica
DVCTEDMGACDPDCSSRCTSAHPGAKAGCDLNNNNPVCRCFYDC

SEQ ID NO: 590 - protein, 50 aa, Medicago truncatula
KLCQKRSTTWSGPCLNTGNCKRQCINVEHATFGACHRQGFGFACFCYKKC

SEQ ID NO: 591 - protein, 40 aa, Medicago truncatula
ECTKIVGSCAKEDCATHCQSYAKGVAVLGSSCSYYNLCTC

SEQ ID NO: 592 - protein, 42 aa, Medicago truncatula
EKCSLFIAGCLDTPACDSYCKDQWSGGIGICSNERCICNFEC

SEQ ID NO: 593 - protein, 12 aa, Medicago truncatula
CSNERCICNFEC

SEQ ID NO: 594 - protein, 43 aa, Medicago truncatula
SETCSQFIAGCLDTPSCDSYCKEQYSDGNGICANERCICNFTC

SEQ ID NO: 595 - protein, 36 aa, Medicago truncatula
CSRIVGNCGAMDCLKYCNNLPGSPTGSCRYFNLCTC

SEQ ID NO: 596 - protein, 43 aa, Medicago truncatula
ETCTQNFRPFVDTPSCDNYCKGQWSDGNGICESGGLCICKFPC

SEQ ID NO: 597 - protein, 55 aa, Portulaca oleracea
CLTSCRATRRNDLNPEGSGVCLPLQPSCTPEACQNSCGGSKGACLRRASDIVCCC

SEQ ID NO: 598 - protein, 55 aa, Portulaca oleracea
CLTRCKATRRNDLKPEGSGVCLPLQPSCTAEACQNSCGGSKGACLRRGSDIVCCC

SEQ ID NO: 599 - protein, 44 aa, Portulaca oleracea
KTCEEGMGICGTDCKDRCAQRHPGGEGSCNHLISPPLCTCYYQC

SEQ ID NO: 600 - protein, 61 aa, Prunus persica
SSCIIIVLLVFTAGTLMPMVKGDVCTEDVGTCGDDCSSRCASAHPGAKAACVLNNIPVCRC

SEQ ID NO: 601 - protein, 44 aa, Raphanus raphanistrum
NTCTDGLGTCENCDQRCKAKHGPSSESNCDHSLVMPLCLCYYQC

SEQ ID NO: 602 - protein, 45 aa, Raphanus raphanistrum
NICVDGLGTCESCDQRCKSKHGPSSQGDCDDRSIGGPLCRCHYQC

SEQ ID NO: 603 - protein, 46 aa, Raphanus raphanistrum
QGNLCRDGLGTCENCDLKCKTKHGPSSESNCDHSVGVALCTCFYQC

SEQ ID NO: 604 - protein, 41 aa, Raphanus raphanistrum
ATCQDPLGSCLQCDERCKAKHGPTGQASCDRNQLCTCYYTC

SEQ ID NO: 605 - protein, 41 aa, Raphanus raphanistrum; identical to SEQ ID NO: 604

SEQ ID NO: 606 - protein, 42 aa, Rosa blanda
EICNESIGSCQGIDCNQVCVNKHPGGSGTCDQTNTCNCYFDC

SEQ ID NO: 607 - protein, 40 aa, Trifolium repens
ECTKVVGNCAASDCSSHCNSYARGARVLGSSCSFNNLCTC

SEQ ID NO: 608 - protein, 32 aa, Zea mays
CDPDVCAKSCVKGLNNGNGTCVRPLGCDCVFC

SEQ ID NO: 609 - protein, 50 aa, Zea mays
SSAGCPHPRSMILYPDLPCDPDVCAKSCAKGLNNGNGTCMRPLGCDCEYC

SEQ ID NO: 610 - protein, 48 aa, Arabidopsis lyrata
VCVGATDMCTDTCPQSCCDRQCAIKYKNGHGGCVNYAGYRMCICEYSC

SEQ ID NO: 611 - protein, 43 aa, Arabidopsis thaliana
CQGFKFNPCERGGDRGCTVFCKRKLVTRGECRDEGCWCCPGQV

SEQ ID NO: 612 - protein, 47 aa, Arabidopsis thaliana
CSGGTGMCSGKCPYKCCDTSCAQKYNGGRGFCNSFGNYNFCQCEYPC

SEQ ID NO: 613 - protein, 47 aa, Arabidopsis thaliana
CIGATDMCTDKCPTSCCDRQCAIKYKNGKGGCVDYAGYRMCICEYTC

SEQ ID NO: 614 - protein, 40 aa, Arabidopsis thaliana
CSDRCGAQCCNQNCAQKYNQGSGFCDSIGNTSLCKCQYNC

SEQ ID NO: 615 - protein, 47 aa, Arabidopsis thaliana
CNGGLGNCGESCNEQCCDRNCAQRYNGGHGYCNTLDDFSLCLCKYPC

SEQ ID NO: 616 - protein, 54 aa, Bassia scoparia
KKCTDNGGVCSEKCDDGCCLANCKNKFPSKDEVSGSCQDGVGTSIRLCLCEYDC

SEQ ID NO: 617 - protein, 48 aa, Brassica napus
ICNGGAGLCSARCLGSCCDTNCAQKFNGGHGFCSTLGTFSLCQCQYPC

SEQ ID NO: 618 - protein, 48 aa, Brassica napus
TCNSGTTLCTEQCSDSCCDTNCAQSHDGGHGICNSIGNTRLCLCEYPC

SEQ ID NO: 619 - protein, 43 aa, Brassica napus
QCYGGTGLCSSACNQNCAQKYLGGSGFCESIGISRLCKCQYPC

SEQ ID NO: 620 - protein, 48 aa, Brassica napus
TCNGGAGLCSVRCPQKCCDINCALKFIGGSGMCFTVGNTSVCQCKYPC

SEQ ID NO: 621 - protein, 48 aa, Brassica napus
TCNGGAGLCSVNCPQKCCDINCALKFIGGSGMCLTLGNTSVCQCKYPC

SEQ ID NO: 622 - protein, 48 aa, Brassica napus
TCNGGAGLCSVRCPQKCCDVNCALKFTGGSGMCFTLGNTSVCQCKYPC

SEQ ID NO: 623 - protein, 48 aa, Brassica napus
ICYSGAGLCTTKCWDECCNKTCASMYLNGVGYCDSIGHINLCKCQYPC

SEQ ID NO: 624 - protein, 48 aa, Brassica napus
ICYSGAGLCTPKCWDECCNKTCASMYLNGVGYCDSIGHINLCKCQYPC

SEQ ID NO: 625 - protein, 31 aa, Brasicca Rapa
CKVTSDCDPSMKPSCVSGSYMCFNGFCTCTH

SEQ ID NO: 626 - protein, 47 aa, Brasicca Rapa
CNGGAGLCSQNCPEKCCDTNCATKFNGGHGSCVTLGNFSLCQCEYPC

SEQ ID NO: 627 - protein, 62 aa, Carica papaya
CERDVDCMGACPHGGFCDMKNGKCSCLPLSTQARCKRDVDCMGACPHGGFCDMKNGRCSCLP

SEQ ID NO: 628 - protein, 63 aa, Carica papaya
CTCYYSCNLQPPPPETCNDGLGYCTVACEEDCCNRKCSEKHYQGRGLCNEIGTIKLCQCQYPC

SEQ ID NO: 629 - protein, 61 aa, Carica papaya
CLSPPPRRRCNVGIDRCTAACNEKCCDENCMSKFPEHLNCHGSCSDLLPPQFSVCICAYDC

SEQ ID NO: 630 - protein, 62 aa, Citrus clementina
CEANPSRKLCKEDLGLYPRGCTAQQCQNDCANKFPGSKDNVHGYCYGPDIYPDQSCRCAYFC

SEQ ID NO: 631 - protein, 61 aa, Citrus clementina
CKSDLGLYPRGCAAQQCQKDCENEFHGYSKEDVHGYCYGHDIYPDQSCRCAYFCPSFKHNG

SEQ ID NO: 632 - protein, 54 aa, Citrus clementina
LCKYYVGPNPQGGCSDEDCDSTCSQKFPGSDQDGHGLCQAVEYPNLACYCIHLC

SEQ ID NO: 633 - protein, 47 aa, Citrus clementina
KCTAGLGACDQCRDLCCNGKCAAQFKGGQGFCDNIGAQYLCQCTYDC

SEQ ID NO: 634 - protein, 62 aa, Citrus sinensis
CAGRGDKKLCKYYVGPNPQGGCSDEDCDSTCSQKFPGYDQDGHGLCQAVEYPNLACYCIHLC

SEQ ID NO: 635 - protein, 48 aa, Citrus sinensis
KKCTAGLGACDQCRDLCCNGKCAAQFKGGQGFCDNIGAQYLCQCTYDC

SEQ ID NO: 636 - protein, 47 aa, Cucumis melo
CISGLGLCTGQCKSDCCNAKCRRQYQGGEGYCDTNVGVPLCQCSHPC

SEQ ID NO: 637 - protein, 47 aa, Cucumis sativus
CISGLGLCTAQCKSDCCNAKCGQQYKGGEGFCDTNVGVSLCQCSHPC

SEQ ID NO: 638 - protein, 65 aa, Glycine max
CVSPQPNKDTEPIRKCTSGLGLCSIDHCYDDCCNSKCAKQFKEGIGHCEIVGSMGTILCTCDYVC

SEQ ID NO: 639 - protein, 48 aa, Glycine max
CNNGLGVCTLQCGDACCNANCARKYNQGTGMCSTIGNNNLCTCQYRCG

SEQ ID NO: 640 - protein, 53 aa, Malus domestica
KCKISLGIWGENCSESDCNSQCASKYPGPQEGSGYCYSVGAPFYTSCFCEYKC

SEQ ID NO: 641 - protein, 50 aa, Medicago truncatula
KLCERRSKTWSGPCLISGNCKRQCINVEHATSGACHRQGIGFACFCKKKC

SEQ ID NO: 642 - protein, 49 aa, Medicago truncatula
NCIIGMGICNGDCQDECCNKRCVSRYSKTGSGNCVDAFGMILCLCSYDR

SEQ ID NO: 643 - protein, 50 aa, Medicago truncatula
RDCNASTGPCSKECGDSCCNNKCASKYNQGVGYCRSLLPPLAMCQCVYAC

SEQ ID NO: 644 - protein, 48 aa, Medicago truncatula
CNASTGPCSKECGDSCCNNKCASKYNIGVGYCRSLFLPLAMCQCVYAC

SEQ ID NO: 645 - protein, 51 aa, Medicago truncatula
KRDCEVNLGFCDNGGSPSCNDKCSSRYQAGTGYCDASIDPRFATCTCLYVC

SEQ ID NO: 646 - protein, 53 aa, Medicago truncatula
CSVGFGLCENCDLNCCNENCVNYYAHEYKNIKGKCLHILDPDPTYCICLYDPK

SEQ ID NO: 647 - protein, 49 aa, Medicago truncatula
RKCSVSTGFCNDGASACNSECGNRYYAGIGYCDGSIYPQIPICYCQYVC

SEQ ID NO: 648 - protein, 35 aa, Portulaca oleracea
GICFPQPNCKPDVCQKSCGASKGACLQGGTQCCCA

SEQ ID NO: 649 - protein, 35 aa, Portulaca oleracea
GICFPQPNCKPDVCQKSCGASKGACLQGATQCCCA

SEQ ID NO: 650 - protein, 50 aa, Portulaca oleracea
KRCTIGLGLCGIESCFNECCNSKCNAQHPGGEGYCVNAAGTWLCQCEYNC

SEQ ID NO: 651 - protein, 64 aa, Prunus persica
CGPPVPPPYSKTCKLSLGIWGERCSEKDCNSQCAAKYPGPQQGMGYCYSVGAPVYTSCFCQYKC

SEQ ID NO: 652 - protein, 49 aa, Raphanus raphanistrum
KICNGGAGICSRSCPETCCNTNCAQKFNGGHGFCSTLGNFNLCQCQYPC

SEQ ID NO: 653 - protein, 49 aa, Raphanus raphanistrum
DTCNGGAGLCSVRCPQKCCDINCALKYAGGSGMCYTLGNSSVCQCKYPC

SEQ ID NO: 654 - protein, 49 aa, Raphanus raphanistrum
KTCNSGTTLCTEQCSDNCCDTNCAKSHVGGHGICNSIGNTRLCLCEYPC

SEQ ID NO: 655 - protein, 44 aa, Raphanus raphanistrum
KQCYGGAGLCSSACNQNCAQKYPGGSGFCESIGSTRLCKCQYPC

SEQ ID NO: 656 - protein, 44 aa, Raphanus raphanistrum; identical to SEQ ID NO: 655

SEQ ID NO: 657 - protein, 49 aa, Rosa blanda
KTCNAGLGYCSASCNDQCCAQNCASKYKDGVGYCDTLGWTSLCQCKYSC

SEQ ID NO: 658 - protein, 49 aa, Trifolium repens
ACDVGMGICTRDCQDDCCNNKCVSRFRNTGHGSCVDAFNMILCLCSYKR

SEQ ID NO: 659 - protein, 46 aa, Zea mays
CPDPESVTLYPGKPCNRQQCKTDCASKYHGGVGVCLNPKGCYCEYC

SEQ ID NO: 660 - protein, 46 aa, Zea mays
CPHPRSTILYPDLPCDPDVCAKSCAKGLNNGNGTCMRPIGCDCVFC

SEQ ID NO: 661 - protein, 46 aa, Zea mays
CPHPRSTILYPDLPCDPDVCAKSCAKGLNNGNGTCVRPIGCDCVFC

SEQ ID NO: 662 - protein, 46 aa, Zea mays; identical to SEQ ID NO: 661

SEQ ID NO: 663 - DNA, 81 bp, Arabidopsis lyrata
atggagaggacaagtacttcacttctattccttgttagcttagttatcatatttgccacagttgtgaatcagataagagca

SEQ ID NO: 664 - DNA, 63 bp, Arabidopsis thaliana
atggctatcacaaaaaaaaaattagtcgtgtatactttcactcttctctttatcatatcttat

SEQ ID NO: 665 - DNA, 78 bp, Arabidopsis thaliana
atggagaggataacttcacttgtattctttgctagcttccttattatatttgtctcaggtgttaatcagacaagagca

SEQ ID NO: 666 - DNA, 81 bp, Arabidopsis thaliana
atggagaggacaagtacttcacttctattcctgcttagcttacttatcatatttgcctcagctgtgaatcagataagagca

SEQ ID NO: 667 - DNA, 78 bp, Arabidopsis thaliana
atggagaaggcactttcacttgtggttttcatcatcttctctatcatgcttgcttccgttgagaataaggtaaacgca

SEQ ID NO: 668 - DNA, 78 bp, Arabidopsis thaliana
atggagaggataccttcacttgcatcccttgttagcttgcttatcatatttgccacagttgttaatcagacaagagca

SEQ ID NO: 669 - DNA, 21 bp, Bassia scoparia
atgatgaacatagcgagagga

SEQ ID NO: 670 - DNA, 99 bp, Brassica napus
atggagaggataactccagttgtattactcgttagcttgcttatcatgtttgcatcaggcattgttatgtctctcaattttgtgaatcagaccagagca

SEQ ID NO: 671 - DNA, 18 bp, Brassica napus
atgattgaggcacaaggg

SEQ ID NO: 672 - DNA, 78 bp, Brassica napus
atgaagaatacattttcacttgtggttgtaatcatcttctttgtcatgctttcttccgttgctaataaggtgaaggca

SEQ ID NO: 673 - DNA, 78 bp, Brassica napus
atggagagaataactccacttgtattacttgttagcctacttatcatttctgcctcagttgtgaatcggactagagca

SEQ ID NO: 674 - DNA, 45 bp, Brassica napus
tttaatgatgtgtacaatgttacagttgtgaatcagactagagca

SEQ ID NO: 675 - DNA, 78 bp, Brassica napus
atggagagaataactcaacttatattacttgttagcctacttatcatttctgcctcagttgtgaatcagactagagca

SEQ ID NO: 676 - DNA, 78 bp, Brassica napus
atggagaggggatcttcacgtgtatttttattcatcttcttcatcatgcttgcttctgatgccaataaggtgatggca

SEQ ID NO: 677 - DNA, 78 bp, Brassica napus
atggagagggaatcttcacgtgtatttttattcaccttcttcatcatgcttgcttctgatgccaataagatgatggca

SEQ ID NO: 678 - DNA, 42 bp, Brasicca Rapa
atggcatcaaagatcacattcttctttctccttgctctcgtt

SEQ ID NO: 679 - DNA, 78 bp, Brasicca Rapa
atgcagaggacaacttctcttgtattccttgttaactttcttatcatatttacctcagttgtaaatcagagtagagca

SEQ ID NO: 680 - DNA, 45 bp, Carica papaya
atggagagttatagtttcaagtcaacatcactgtttgtaatttta

SEQ ID NO: 681 - DNA, 63 bp, Carica papaya
atggctaagctgcttaatccagcatttcaatccttcctcctggcgtttgtattcttaggtttt

SEQ ID NO: 682 - DNA, 69 bp, Carica papaya
atggccaagtactccttcatcgccattattctactgctcgcattcgaaagaggattgttggtggatggt

SEQ ID NO: 683 - DNA, 81 bp, Citrus clementina
atgtacgatagcaaggactcctttgcattaatctttctacttctcatagcgggcaccgcattgctgccggcagctaaaggg

SEQ ID NO: 684 - DNA, 66 bp, Citrus clementina
gtctcccctgctttattctttcttgttctcatagcaggaaccacattgctgccagtaactaaaggg

SEQ ID NO: 685 - DNA, 90 bp, Citrus clementina
atgaagaaggtatcctcatctccttccaatgcttcgctcctcttcctcttctcactcttagcagtaaccatgttggtcgaagtaaaaggg

SEQ ID NO: 686 - DNA, 75 bp, Citrus clementina
atggaaattggagataaattgttactaattcaattaatcaatttacgtggaaatgtagtgcataccatcaaggga

SEQ ID NO: 687 - DNA, 93 bp, Citrus sinensis
atgaagaaggtatcctcatctccttccaatgcttcgctcctcttcctcttctcactcttagcaggagtaaccatgttggtcgaagtaaaaggg

SEQ ID NO: 688 - DNA, 54 bp, Citrus sinensis
ttactaattcaattaatcaatttacgtggaaatgtagtgcataccatcaaggga

SEQ ID NO: 689 - DNA, 24 bp, Cucumis melo
atgactccagtggttggaaacaag

SEQ ID NO: 690 - DNA, 24 bp, Cucumis sativus
atgactccagtggtgggaaataag

SEQ ID NO: 691 - DNA, 81 bp, Glycine max
atggtgaaccgcatctcaaactatgttcctctcttcatcattttgattgttttggtaacagggcaaaaacaagtggaagga

SEQ ID NO: 692 - DNA, 81 bp, Glycine max
atggtgacttatatctcaaactattctcttctctttgtaatgttggctctgactataacaggcctaatagaagtaaaagga

SEQ ID NO: 693 - DNA, 87 bp, Malus domestica
atggctactctatctggagctttttccaccgtccttgtcttgcttcttatattcgctgtagggacactcatgcccatggtgaaaggt

SEQ ID NO: 694 - DNA, 87 bp, Medicago truncatula
atgacttcctctgctagtaaattctataccatcttcatttttgtctgccttgcctttctctttatttccacatctgaggtggaagca

SEQ ID NO: 695 - DNA, 84 bp, Medicago truncatula
atgacgaaccaaatgtcaacatctttcagtttctttgccatcttggttttagttgttgcagggcaattaatacaggtagaaggt

SEQ ID NO: 696 - DNA, 78 bp, Medicago truncatula
atggtgagccaaatgtcaagttatcttctctccttgatgctggttctttttgtagtggggcaaatgaaagtgaaagga

SEQ ID NO: 697 - DNA, 69 bp, Medicago truncatula
atgcgatccctctctaacattgtgttgcaattcctttcatcttggtttattgcttttgtaattgagatt

SEQ ID NO: 698 - DNA, 81 bp, Medicago truncatula
atggtgaatcaaatgtcaaattacctcctctctttgatgctggttctttttgtagtaggtcaagtgacagtgaaaggatca

SEQ ID NO: 699 - DNA, 81 bp, Medicago truncatula
atggcgaagatctcaaattctctatgcatctttatcgtccttgtttccaccttcacaatgcaatcaatcctagtagaagca

SEQ ID NO: 700 - DNA, 78 bp, Medicago truncatula
atggtgaaccaaataccaaattatattctctttttgatgctgtttctttctgtagtagggaaagtgaaagtgaaagga

SEQ ID NO: 701 - DNA, 63 bp, Portulaca oleracea
atggccatgaaaacttccttcacacatcctgttctcataatcgctgttcttttgtttagcggt

SEQ ID NO: 702 - DNA, 87 bp, Portulaca oleracea
atggcaaaatctaatcctgcattttacgctctcctcttcatttcagcatctatagttggagtggcgttgatcaatgccgtagaaggc

SEQ ID NO: 703 - DNA, 18 bp, Prunus persica
atggctactctctctcga

SEQ ID NO: 704 - DNA, 96 bp, Raphanus raphanistrum
atgaagaggaaaactccagttgtattactcgttagcttacttatcatgtttgcatcaggcattgttatatctctcattgtgaatcagaccagagca

SEQ ID NO: 705 - DNA, 78 bp, Raphanus raphanistrum
atggagagaataactccacttgtattactcgttggcctacttatcatgtttgcctcagttgtgaatcagactagagca

SEQ ID NO: 706 - DNA, 27 bp, Raphanus raphanistrum
atgtctgcgttagttacgattgaggca

SEQ ID NO: 707 - DNA, 9 bp, Raphanus raphanistrum
gtgaaggca

SEQ ID NO: 708 - DNA, 78 bp, Raphanus raphanistrum
atgaagaatattttttctgttgtggttttcatcatcttctttgtcatgttttcttcagttgctaataaggtaaaggca

SEQ ID NO: 709 - DNA, 78 bp, Rosa blanda
atggctatcacatcctgcactcagattgttctccttgcttttgcatcagctgccataatggggatgatggtgaaggca

SEQ ID NO: 710 - DNA, 84 bp, Trifolium repens
atggcaaatcaaatgtcaaaatcgtcttgtttctttgccatcttggttttacttgttgcagtccaattaatacaagttaaaggt

SEQ ID NO: 711 - DNA, 24 bp, Zea mays
atgatcctgtacccagacctgccc

SEQ ID NO: 712 - DNA, 162 bp, Zea mays
atgagtctgcggcaatcatcagttcatcaccgattcaccatcaacaacatctccagcaacaaacctgcagcagggatgaggactagtcgcctggtgttcctatttgccatcgtccccctcctgctactgctagcatcatcaggtttgacgccgacgaaggcg

SEQ ID NO: 713 - DNA, 57 bp, Arabidopsis lyrata
atgtttaaaatttacctcagtataattgtttttaattacaatgttgtggttttggga

SEQ ID NO: 714 - DNA, 81 bp, Zea mays
atgtcgttctataagaaactagtgatcgttggtttcgccttaaccttgctccttgtgtcattccgaatggatgcgactgca

SEQ ID NO: 715 - DNA, 96 bp, Ipomoea trifida
atggaacgcttcattaagttgtttgccatcattttcctcttacttgcgctcatttattctgatgctgaaattgagcccatgaaaattggacacggt

SEQ ID NO: 716 - DNA, 81 bp, Abutilon theophrastii S
atgatgaaaaaatcgttggggattttctttctgctccttattgtcttagcctcccaatgggcgctgcagccaactgaggct

SEQ ID NO: 717 - DNA, 24 bp, Abutilon theophrastii S
atgggttgtaaagctgaggaatgt

SEQ ID NO: 718 - DNA, 93 bp, Ambrosia artemisiifolia R
atgaaatcttccatgaagttatatgcagcgttgttgcttgttgtcatgtgtataatggtcaatgaaatgggtggtccgatggtggtggaagcg

SEQ ID NO: 719 - DNA, 117 bp, Ambrosia artemisiifolia S
atgaagtttattattagcatgtttatagtacttttactagttatcggagcatcagcacggatggatgctatgattaataatgaaggtgccgagagcaagacgtacagtagcaaacca

SEQ ID NO: 720 - DNA, 90 bp, Amaranthus rudis
atgaagcaagcaatgaggccttttgctgctattttccttgtgcttttgcttgtattggccacagagatgggaccaaaagtagcagaagca

SEQ ID NO: 721 - DNA, 81 bp, Amaranthus rudis
atggagaacaaattctttgggcttttgcttttgattctcgtcgtacttgcttctgagacgagtatggttgaagtggatgca

SEQ ID NO: 722 - DNA, 213 bp, Ambrosia trifida
ggatgtcatccatgctttaccaaaattaaggaggttgcaaattataatcattgtgaaaagaaatttttgcttgcgatgacgatgatgatgaaacattcagtttcattacattcatggaccgtaaaagttattatagtcagcctcatcatcacatctgtgatgagagaaactatcggtcgagcaccactagcagcgtcaccaccaccaccatgt

SEQ ID NO: 723 - DNA, 93 bp, Ambrosia trifida S
atgaagtcatccatgaagctgtttgcaacgttgtttcttgttgtcatgtgtctaatggccaatgaaatgggcggtccgatcgtggtggaagct

SEQ ID NO: 724 - DNA, 96 bp, Brachypodium distachyon
atggagtcattgcgcaggttctccgctgccgctgccatccttgcccttctgctgctcctcgtggccaccgaggcggttacagctcaggcgtacggg

SEQ ID NO: 725 - DNA, 78 bp, Brassica napus
atgaggaaatcccttcaactcttgttcaccttcttaactatcttcatcgttctttcactaggaatgatggtagatgcg

SEQ ID NO: 726 - DNA, 75 bp, Brassica napus
atggctaaaaacaccatctttgctacctttatgatcgttctagttctagggatggtgatggaggacacacaagga

SEQ ID NO: 727 - DNA, 90 bp, Brassica napus
atgatggccatggcaactaagtcagtttcttccttcgccatacttttcatcctctttctagttatcatagagttgccggagacaaaagca

SEQ ID NO: 728 - DNA, 87 bp, Brassica napus
atgaaaaattattttcgatcttcgcttattggtctcatcatgctcacaattcttctacttggagtaatggcgactgctcagaaggga

SEQ ID NO: 729 - DNA, 231 bp, Brassica napus
atgggaaaacacacagtgaggttccttgttagagatttgcctgctcctataggtagttctggtggtagcaacggttacttaggcacagcaccaacaccaagtgttcaaccacatcaaaacaaacccaaagtaagacacatagcaaaagtgacaatggcgttgaaaccactttccatctttgttgtcttcttcatcttcttagttatctctgacgtgccagagatagaagcg

SEQ ID NO: 730 - DNA, 81 bp, Brassica napus
atggcagcaaagaagttctcatttcttcaattacccttcttagtggtgtttgctctcatccttttgcctatgatttcagga

SEQ ID NO: 731 - DNA, 78 bp, Sorghum bicolor
atggcatccaacaagattgtagcagtgcctggtgtcttcatcctcgccttgctccttgttgcctattgtgcggaggca

SEQ ID NO: 732 - DNA, 78 bp, Canavalia rosea
atggagaggaaatcacttggactgttcttcttcatcctcattctcctttcttcccaaatggtggtgcagacagaggga

SEQ ID NO: 733 - DNA, 93 bp, Canavalia rosea
atggctcgttctatgccgttggtttcaaccatttttgtcttgcttctgcttctagtggccactgagatggagccaacaatggtggctgaagca

SEQ ID NO: 734 - DNA, 84 bp, Canavalia rosea
atggccagccgcatctcaatgctttcctttctatttgtcaccctagttctagtttcagcagttgggaacatagtggcggaagca

SEQ ID NO: 735 - DNA, 108 bp, Chenopodium album
atgaagatgtcaatgaggtcgattgctgtgattttctttgtgtgcctacttgtcttgtcaacagaagacgcgggtccaagaaaggcagaagctggaatatttagcagg

SEQ ID NO: 736 - DNA, 78 bp, Chenopodium album
atgaggccttttactgctgtttttctcgtcctcctgcttgtctttgccgcagagatgggaccaagagtagcagaagca

SEQ ID NO: 737 - DNA, 96 bp, Conyza canadensis
atgaggccttctatgaagctactagcaacttttttgcttgttgtgatgtgccttatggccaatggaatgggtggtggtccgatggtggcggaagca

SEQ ID NO: 738 - DNA, 96 bp, Stellaria media
atggctctatctaagcagatactaatcgtgtttttccttgtcgttgctttaatagccaattcaccctactcagcgtcgggaggtgaggcacctgga

SEQ ID NO: 739 - DNA, 87 bp, Eragrostis tef
atggaggcttggaggaagaccgcgctgtgctctgttctccttgtgctgctcatcgccgccaccagcgaggtggccgttgttgaggcc

SEQ ID NO: 740 - DNA, 9 bp, Medicago truncatula
gtacaggcg

SEQ ID NO: 741 - DNA, 90 bp, Eragrostis tef
atggctccttcagcaaagaatcgctctgcaaccatgctcctaattgtcatcgtgaccgtcgtactatgttcaatgcctacatgcacgcag

SEQ ID NO: 742 - DNA, 90 bp, Eragrostis tef
atggcgccctcatggaagaatctctctgtggtcctcctggtccttgcacaaatgttgctggttcatgcttggatccatgcggagtccgct

SEQ ID NO: 743 - DNA, 87 bp, Eragrostis tef
atggaaccttcgcgcgagaagctctccgccgccgtcctcctcctgctgctggctctaaccgccgacatggggcctcgggttcaggcg

SEQ ID NO: 744 - DNA, 87 bp, Eragrostis tef
atgaagatggtgctgcagcctcgcatcgtcgccgcagcatccgtcctgatcttgctcctcctgaccgccggtggtcaggttcaggcc

SEQ ID NO: 745 - DNA, 66 bp, Eragrostis tef
atgaaggggcagactgcagcaactgctgccttggtcgtgctcctcctcgtcttcggcgccgaggcc

SEQ ID NO: 746 - DNA, 72 bp, Eragrostis tef
atgaagggcggcaagatcgcagctacaacgacggccttgcttctgctcctcctagccttgggcgcggaggcc

SEQ ID NO: 747 - DNA, 99 bp, Eragrostis tef
atggcgccttcacagatgaatctctctgccgtcctcctagtcgtcatcctcctacccgtcgtcatggcatcagctcgtgagtcgccgtcggtgtccgct

SEQ ID NO: 748 - DNA, 93 bp, Coix lacryma jobi
atggcgctgtctcgccgcatgggcgctcccgtcctcatccttgtgctcctcctcgtcgccacagagctggggacgaccaaggtggcggaggcg

SEQ ID NO: 749 - DNA, 69 bp, Coix lacryma jobi
atgaccatgaagggtaagattgcagcaacgactgccttggtcctcctcctcctgaccttatgtgccgag

SEQ ID NO: 750 - DNA, 69 bp, Eragrostis tef
atgacgggtggcaagatcgcagctacaacggcattgcttctgctcctcctagccttcggcgcggaggct

SEQ ID NO: 751 - DNA, 87 bp, Eragrostis tef
atggagactccaagaaaagcagtggcttcatgccttctcctttgcctgctcctagtgcattccggcatgacgccgtcggttcttgcg

SEQ ID NO: 752 - DNA, 12 bp, Coix lacryma jobi
atggaggcggct

SEQ ID NO: 753 - DNA, 60 bp, Eragrostis tef
atggcaacgatgtgttccatgctgcttatactgttggtccttgcatcaggttgtgaggct

SEQ ID NO: 754 - DNA, 96 bp, Coix lacryma jobi
atgggtctatccaccaagctttttgtggtccttctcctgctcctcactggatataatactgagacgcggcagctgggaccagtgactatggcattg

SEQ ID NO: 755 - DNA, 81 bp, Eragrostis tef
atggagccttcacgaggaaagctttccgcagccatcctcctcctcctgcttttcgttacggccgccgggccggttgaagct

SEQ ID NO: 756 - DNA, 30 bp, Stellaria media
gaaggaagaatcgctatcagacgtaattgg

SEQ ID NO: 757 - DNA, 138 bp, Stellaria media
atgaagtcatatattgcttttgcttccattctcttgtttatcctagctaccgaacggggtcccgatggcgtagaaggtgttcattttaccccaccggtaggacgcggacgcggaggaggttatggaggtaagggaccc

SEQ ID NO: 758 - DNA, 87 bp, Eragrostis tef
atggaggcttggaggaagaccgcggtgtgctctgttcttcttgtgctgctcatcgccgcctccagcgaggtggcctttgttgaagcc

SEQ ID NO: 759 - DNA, 144 bp, Eragrostis tef
atggctcacacctcagcgttagcatcgctcctcccactcctacttatggtgctcttggccacctgtgctcaaactgatgggagtgaacacgcattcccaatattgcgacgtaagcccataccgccgccaacgccggaggatgcc

SEQ ID NO: 760 - DNA, 96 bp, Stellaria media
atgggaaaaactgtgttgagtatcaatgttactttccttacactcttatttgctgtgctcctcctcaatgatgtcatgtatgcacctgttgagggg

SEQ ID NO: 761 - DNA, 90 bp, Eragrostis tef
atggcgtcttcaggaaaaaatctctctgcaaccatgctcctaattgtcatcgtggccgccgtactatgttcaatgcctacatgcacacag

SEQ ID NO: 762 - DNA, 81 bp, Eragrostis tef
atggctagcaaaatctccacgcgagctgtgacggtcatcatgattttggagctgctgatccttctgtcttcggttggcgca

SEQ ID NO: 763 - DNA, 87 bp, Arabidopsis lyrata subsp. lyrata
atgaagagctctatccagttaatctctacgcttttcttcttagttatacttgttctcgcaccaggtatgatgaagatggttgaagga

SEQ ID NO: 764 - DNA, 90 bp, Arabidopsis thaliana
atgaagctctctatgcgtttgatctcagctgttctcatcatgttcatgatattcgtcgccactgggatgggaccagtcactgtggaggca

SEQ ID NO: 765 - DNA, 99 bp, Pinus sylvestris
atggcgggcaagggagttggcagtcgactcagcactctttttctgctcgtgctgcttgttataaccattgggatgatgcaggttcaagttgcagagggc

SEQ ID NO: 766 - DNA, 75 bp, Petunia hybrida
atggctcgctccatctgtttcttcgcagttgctatactagcattgatgctctttgctgcctatgagacggaagcg

SEQ ID NO: 767 - DNA, 192 bp, Digitaria sanguinalis
catgtgattgccaggttcctccaaactcaaccgttagcaattctgcttgcggcttgcccaatcttcttgaacgcaccaacttccacgagaaaacaagcaatggagcctgcaggaaaaaatctctctgccgtcctcctactcaccgccctcctacttgtcgccatagccgctggtgaatcggcgtcggttggg

SEQ ID NO: 768 - DNA, 75 bp, Saccharum ravennae
atgtccatgaacaagaaacatttggtcgctgccttcgtcaccttggccttgatcatggcgccataccgcgcaaca

SEQ ID NO: 769 - DNA, 15 bp, Saccharum ravennae
atggaggcagctgca

SEQ ID NO: 770 - DNA, 81 bp, Saccharum ravennae
atgtcgttctacaagaaactagtaatcgttggcttcgtcttgaccttgctccttgtgtcacaccgcatggaggcggctgca

SEQ ID NO: 771 - DNA, 78 bp, Saccharum ravennae
atggcatccaataaggacgtagtggttcctgctatcttcgtccaggccttgctcctcgtggcctattgtgcggaggca

SEQ ID NO: 772 - DNA, 87 bp, Euphorbia maculata
atggctaagctacattcttataccatgttatatctcttcgccttcctcttccttattgtctccactgagataccaggtataagtgca

SEQ ID NO: 773 - DNA, 87 bp, Euphorbia maculata
atggctaagctgcattcttataccatgttctacgtctttgccttccttttcctccttttctccactgagataccgggtataagtgca

SEQ ID NO: 774 - DNA, 81 bp, Euphorbia maculata
atgaagatatcagctgggttttggttacttttgcttattgtgttagcttctcaagacggtatggtgattgggagctatgga

SEQ ID NO: 775 - DNA, 102 bp, Foeniculum vulgare
atggcacagaaagctagcgctctcaccttgtctgccatcttcgttctcttccttgtagctagctactcagtagcaaagggagccagagctgccgcagaggga

SEQ ID NO: 776 - DNA, 54 bp, Bassia scoparia
atgttactaataatgattttattgcgttgtgcagaagtggaagtggccgaaggt

SEQ ID NO: 777 - DNA, 90 bp, Bassia scoparia
atggcaaagtctcgttcctcccttaacttcattgcaatccttctcctactcttagttgttcttaaccaagaaatggtggcagtggaggga

SEQ ID NO: 778 - DNA, 81 bp, Bassia scoparia
atggacaagaaatgtgccgtattgttcatgatgttgatcatcttctttgcttcgcaaggaatggtgcaaaaaactgaggca

SEQ ID NO: 779 - DNA, 36 bp, Bassia scoparia
atgcgtgcagggcatgcgcaggccgcatgggaggcg

SEQ ID NO: 780 - DNA, 24 bp, Bassia scoparia
atgggtccaaaaagggcagaagcc

SEQ ID NO: 781 - DNA, 69 bp, Oryza sativa subsp. japonica
atgaccaccatgcttgccattgccttactcatggccatcctcttcgcctcactctccggcacagaagct

SEQ ID NO: 782 - DNA, 72 bp, Oryza sativa subsp. japonica
atggaggcaaaggttgcaaccactgtgttagtcttgctcctcctcacccttggtggtgaggtggctgctgcc

SEQ ID NO: 783 - DNA, 87 bp, Medicago truncatula
atggctattagcttcaaccgtgtgcatttttttattgcattgctatgcattgcatctattttgactccaggaggagcaattgattca

SEQ ID NO: 784 - DNA, 87 bp, Medicago truncatula
atggctcgttcagttcctttggtttccaccatctttgtcttccttctgcttcttgtggccactgggccaagtatggtggcagaagca

SEQ ID NO: 785 - DNA, 96 bp, Panicum hallii
atgtggacgaggaaggcggcggcgcgggcggccgtcatgctcctgctgctcatcgtcgtcgcacaggagtactcgccggcgccggcggcggaggcg

SEQ ID NO: 786 - DNA, 75 bp, Panicum virgatum
atggcgctgtctcgtggcatggtcctcttcttcctgctcctcctcgtcgcaccagagatagggacgatcgatgcc

SEQ ID NO: 787 - DNA, 69 bp, Panicum virgatum
atgaatgggaagatcgcagcgacgaccgctgccctgtgcttgctcctcatgacctgtggtgcggaggcc

SEQ ID NO: 788 - DNA, 15 bp, Plantago major
atgaaggtagaagca

SEQ ID NO: 789 - DNA, 81 bp, Portulaca oleracea
atgaagcaatcaatgaggctctttgctgccctctttcttgtactcttgcttgccttggccactgagaatggagtagaggga

SEQ ID NO: 790 - DNA, 87 bp, Portulaca oleracea
atggccatggaaaagaagtacttgagcctattgttgctggcatttctcttacttgcattccagagcaacatggttgaagtagaagcg

SEQ ID NO: 791 - DNA, 90 bp, Portulaca oleracea
atggagcgatcaacccgtgttttctctgctcttctactcatgctcctccttgtcttcgctacagaaatggggacaaaggtagcagaggcg

SEQ ID NO: 792 - DNA, 24 bp, Portulaca oleracea
ggaatggtgaagcagacagaggca

SEQ ID NO: 793 - DNA, 81 bp, Raphanus raphanistrum
atgaagctctctctgcgtgtggtgtcagccattctcctctcgttcatgctcctctttacttcaggaatgggtccagtggaa

SEQ ID NO: 794 - DNA, 87 bp, Raphanus raphanistrum
atggctaagtttgcttccatcattgtccttctcttcgctgctcttgtcgtttttgctgctttcgaagcaccaacaatggtggaagca

SEQ ID NO: 795 - DNA, 87 bp, Raphanus raphanistrum
atggctaagtttgcgtccatcatcgcacttctttttgctgctcttgttctttttgctgctttcgaagcaccaacaatggtggaagca

SEQ ID NO: 796 - DNA, 87 bp, Raphanus raphanistrum
atggctaagtttgcttctatcgtcgcccttctcttcgctgctcttgttgtctttgctgcttttgaagcaccaacagtggtggaagca

SEQ ID NO: 797 - DNA, 87 bp, Raphanus raphanistrum
atggctaagtttgcttccatcatcaccttcctcttcgttgttctaattatcttttctgcttttgaagaacaaacgatggtggaaggg

SEQ ID NO: 798 - DNA, 87 bp, Raphanus raphanistrum
atggccaagtttgtttccatcatcacccttcttttcgttgctcttgtactctttgctgcttttgaagcaccaacaatggtggaagcg

SEQ ID NO: 799 - DNA, 30 bp, Rosa blanda
ggaatcttggcatcctcaactgaccgcggt

SEQ ID NO: 800 - DNA, 81 bp, Rosa blanda
atggacaggaaattcttagggcttgttctgttcttcatcgtcctcctgacttctcaagagatggtgattcgcagcgaagcg

SEQ ID NO: 801 - DNA, 81 bp, Rosa blanda
atggagaagaagttctttgggctcgctttgttcttcatcatcctcctgacttctcaagaaatggtgatgcaaagtgaagca

SEQ ID NO: 802 - DNA, 96 bp, Sorghum bicolor
atgggtctctccaccaaactttttgcggtcctcctcctgctcctcattggtggttatactgatacgcagctgggaccggtgactatggcactggcg

SEQ ID NO: 803 - DNA, 93 bp, Spinacia oleracea
atgaagatgtcaatgaggtcgattgctgtggttttccttgtgtgcctacttgtcttgtcaacagaagaaatgggtccaagaaaggcagacgct

SEQ ID NO: 804 - DNA, 84 bp, Spinacia oleracea
atggagaagaaattctttgggcttttggttttgcttctcttcttctttgcttctgagatgaacatggtggttgaagttgatggt

SEQ ID NO: 805 - DNA, 84 bp, Taraxacum officinale
atggcaaaaagatcagttgctgtctacacagtccttctgcttgtcgtcgttcttgccatatcagaaatcgcgacagtgagcgga

SEQ ID NO: 806 - DNA, 39 bp, Taraxacum officinale
atgcccaataacggtgacaattatcaaatcgcgactgca

SEQ ID NO: 807 - DNA, 90 bp, Zea mays
atgtcgttcagcaagcgagtagctgtggccggcgccctcgccttggccctgcagcttatcctggcttcacatcttgcagcagctggagcc

SEQ ID NO: 808 - DNA, 99 bp, Zea mays
atgtcgttcaacaaaaacctagcagtggtcgttggcttcaccttggctctgctcatcgcgtcgaacggtgaagaaacttcctcgtatggcggatcagcg

SEQ ID NO: 809 - protein, 27 aa, Arabidopsis lyrata
MERTSTSLLFLVSLVIIFATVVNQIRA

SEQ ID NO: 810 - protein, 21 aa, Arabidopsis thaliana
MAITKKKLVVYTFTLLFIISY

SEQ ID NO: 811 - protein, 26 aa, Arabidopsis thaliana
MERITSLVFFASFLIIFVSGVNQTRA

SEQ ID NO: 812 - protein, 27 aa, Arabidopsis thaliana
MERTSTSLLFLLSLLIIFASAVNQIRA

SEQ ID NO: 813 - protein, 26 aa, Arabidopsis thaliana
MEKALSLVVFIIFSIMLASVENKVNA

SEQ ID NO: 814 - protein, 26 aa, Arabidopsis thaliana
MERIPSLASLVSLLIIFATVVNQTRA

SEQ ID NO: 815 - protein, 7 aa, Bassia scoparia
MMNIARG

SEQ ID NO: 816 - protein, 33 aa, Brassica napus
MERITPVVLLVSLLIMFASGIVMSLNFVNQTRA

SEQ ID NO: 817 - protein, 6 aa, Brassica napus
MIEAQG

SEQ ID NO: 818 - protein, 26 aa, Brassica napus
MKNTFSLVVVIIFFVMLSSVANKVKA

SEQ ID NO: 819 - protein, 26 aa, Brassica napus
MERITPLVLLVSLLIISASVVNRTRA

SEQ ID NO: 820 - protein, 15 aa, Brassica napus
FNDVYNVTVVNQTRA

SEQ ID NO: 821 - protein, 26 aa, Brassica napus
MERITQLILLVSLLIISASVVNQTRA

SEQ ID NO: 822 - protein, 26 aa, Brassica napus
MERGSSRVFLFIFFIMLASDANKVMA

SEQ ID NO: 823 - protein, 26 aa, Brassica napus
MERESSRVFLFTFFIMLASDANKMMA

SEQ ID NO: 824 - protein, 14 aa, Brasicca Rapa
MASKITFFFLLALV

SEQ ID NO: 825 - protein, 26 aa, Brasicca Rapa
MQRTTSLVFLVNFLIIFTSVVNQSRA

SEQ ID NO: 826 - protein, 15 aa, Carica papaya
MESYSFKSTSLFVIL

SEQ ID NO: 827 - protein, 21 aa, Carica papaya
MAKLLNPAFQSFLLAFVFLGF

SEQ ID NO: 828 - protein, 23 aa, Carica papaya
MAKYSFIAIILLLAFERGLLVDG

SEQ ID NO: 829 - protein, 27 aa, Citrus clementina
MYDSKDSFALIFLLLIAGTALLPAAKG

SEQ ID NO: 830 - protein, 22 aa, Citrus clementina
VSPALFFLVLIAGTTLLPVTKG

SEQ ID NO: 831 - protein, 30 aa, Citrus clementina
MKKVSSSPSNASLLFLFSLLAVTMLVEVKG

SEQ ID NO: 832 - protein, 25 aa, Citrus clementina
MEIGDKLLLIQLINLRGNVVHTIKG

SEQ ID NO: 833 - protein, 31 aa, Citrus sinensis
MKKVSSSPSNASLLFLFSLLAGVTMLVEVKG

SEQ ID NO: 834 - protein, 18 aa, Citrus sinensis
LLIQLINLRGNVVHTIKG

SEQ ID NO: 835 - protein, 8 aa, Cucumis melo
MTPVVGNK

SEQ ID NO: 836 - protein, 8 aa, Cucumis sativus
MTPVVGNK

SEQ ID NO: 837 - protein, 27 aa, Glycine max
MVNRISNYVPLFIILIVLVTGQKQVEG

SEQ ID NO: 838 - protein, 27 aa, Glycine max
MVTYISNYSLLFVMLALTITGLIEVKG

SEQ ID NO: 839 - protein, 29 aa, Malus domestica
MATLSGAFSTVLVLLLIFAVGTLMPMVKG

SEQ ID NO: 840 - protein, 29 aa, Medicago truncatula
MTSSASKFYTIFIFVCLAFLFISTSEVEA

SEQ ID NO: 841 - protein, 28 aa, Medicago truncatula
MTNQMSTSFSFFAILVLVVAGQLIQVEG

SEQ ID NO: 842 - protein, 26 aa, Medicago truncatula
MVSQMSSYLLSLMLVLFVVGQMKVKG

SEQ ID NO: 843 - protein, 23 aa, Medicago truncatula
MRSLSNIVLQFLSSWFIAFVIEI

SEQ ID NO: 844 - protein, 27 aa, Medicago truncatula
MVNQMSNYLLSLMLVLFVVGQVTVKGS

SEQ ID NO: 845 - protein, 27 aa, Medicago truncatula
MAKISNSLCIFIVLVSTFTMQSILVEA

SEQ ID NO: 846 - protein, 26 aa, Medicago truncatula
MVNQIPNYILFLMLFLSVVGKVKVKG

SEQ ID NO: 847 - protein, 21 aa, Portulaca oleracea
MAMKTSFTHPVLIIAVLLFSG

SEQ ID NO: 848 - protein, 29 aa, Portulaca oleracea
MAKSNPAFYALLFISASIVGVALINAVEG

SEQ ID NO: 849 - protein, 6 aa, Prunus persica
MATLSR

SEQ ID NO: 850 - protein, 32 aa, Raphanus raphanistrum
MKRKTPVVLLVSLLIMFASGIVISLIVNQTRA

SEQ ID NO: 851 - protein, 26 aa, Raphanus raphanistrum
MERITPLVLLVGLLIMFASVVNQTRA

SEQ ID NO: 852 - protein, 9 aa, Raphanus raphanistrum
MSALVTIEA

SEQ ID NO: 853 - protein, 3 aa, Raphanus raphanistrum
VKA

SEQ ID NO: 854 - protein, 26 aa, Raphanus raphanistrum
MKNIFSVVVFIIFFVMFSSVANKVKA

SEQ ID NO: 855 - protein, 26 aa, Rosa blanda
MAITSCTQIVLLAFASAAIMGMMVKA

SEQ ID NO: 856 - protein, 28 aa, Trifolium repens
MANQMSKSSCFFAILVLLVAVQLIQVKG

SEQ ID NO: 857 - protein, 8 aa, Zea mays
MILYPDLP

SEQ ID NO: 858 - protein, 54 aa, Zea mays
MSLRQSSVHHRFTINNISSNKPAAGMRTSRLVFLFAIVPLLLLLASSGLTPTKA

SEQ ID NO: 859 - protein, 19 aa, Arabidopsis lyrata
MFKIYLSIIVFNYNVVVLG

SEQ ID NO: 860 - protein, 27 aa, Zea mays
MSFYKKLVIVGFALTLLLVSFRMDATA

SEQ ID NO: 861 - protein, 32 aa, Ipomoea trifida
MERFIKLFAIIFLLLALIYSDAEIEPMKIGHG

SEQ ID NO: 862 - protein, 27 aa, Abutilon theophrastii S
MMKKSLGIFFLLLIVLASQWALQPTEA

SEQ ID NO: 863 - protein, 8 aa, Abutilon theophrastii S
MGCKAEEC

SEQ ID NO: 864 - protein, 31 aa, Ambrosia artemisiifolia R
MKSSMKLYAALLLVVMCIMVNEMGGPMVVEA

SEQ ID NO: 865 - protein, 39 aa, Ambrosia artemisiifolia S
MKFIISMFIVLLLVIGASARMDAMINNEGAESKTYSSKP

SEQ ID NO: 866 - protein, 30 aa, Amaranthus rudis
MKQAMRPFAAIFLVLLLVLATEMGPKVAEA

SEQ ID NO: 867 - protein, 27 aa, Amaranthus rudis
MENKFFGLLLLILVVLASETSMVEVDA

SEQ ID NO: 868 - protein, 71 aa, Ambrosia trifida
GCHPCFTKIKEVANYNHCEKKFLLAMTMMMKHSVSLHSWTVKVIIVSLIITSVMRETIGRAPLAASPPPPC

SEQ ID NO: 869 - protein, 31 aa, Ambrosia trifida S
MKSSMKLFATLFLVVMCLMANEMGGPIVVEA

SEQ ID NO: 870 - protein, 32 aa, Brachypodium distachyon
MESLRRFSAAAAILALLLLLVATEAVTAQAYG

SEQ ID NO: 871 - protein, 26 aa, Brassica napus
MRKSLQLLFTFLTIFIVLSLGMMVDA

SEQ ID NO: 872 - protein, 25 aa, Brassica napus
MAKNTIFATFMIVLVLGMVMEDTQG

SEQ ID NO: 873 - protein, 30 aa, Brassica napus
MMAMATKSVSSFAILFILFLVIIELPETKA

SEQ ID NO: 874 - protein, 29 aa, Brassica napus
MKNYFRSSLIGLIMLTILLLGVMATAQKG

SEQ ID NO: 875 - protein, 77 aa, Brassica napus
MGKHTVRFLVRDLPAPIGSSGGSNGYLGTAPTPSVQPHQNKPKVRHIAKVTMALKPLSIFVVFFIFLVISDVPEIEA

SEQ ID NO: 876 - protein, 27 aa, Brassica napus
MAAKKFSFLQLPFLVVFALILLPMISG

SEQ ID NO: 877 - protein, 26 aa, Sorghum bicolor
MASNKIVAVPGVFILALLLVAYCAEA

SEQ ID NO: 878 - protein, 26 aa, Canavalia rosea
MERKSLGLFFFILILLSSQMVVQTEG

SEQ ID NO: 879 - protein, 31 aa, Canavalia rosea
MARSMPLVSTIFVLLLLLVATEMEPTMVAEA

SEQ ID NO: 880 - protein, 28 aa, Canavalia rosea
MASRISMLSFLFVTLVLVSAVGNIVAEA

SEQ ID NO: 881 - protein, 36 aa, Chenopodium album
MKMSMRSIAVIFFVCLLVLSTEDAGPRKAEAGIFSR

SEQ ID NO: 882 - protein, 26 aa, Chenopodium album
MRPFTAVFLVLLLVFAAEMGPRVAEA

SEQ ID NO: 883 - protein, 32 aa, Conyza canadensis
MRPSMKLLATFLLVVMCLMANGMGGGPMVAEA

SEQ ID NO: 884 - protein, 32 aa, Stellaria media
MALSKQILIVFFLVVALIANSPYSASGGEAPG

SEQ ID NO: 885 - protein, 29 aa, Eragrostis tef
MEAWRKTALCSVLLVLLIAATSEVAVVEA

SEQ ID NO: 886 - protein, 3 aa, Medicago truncatula
VQA

SEQ ID NO: 887 - protein, 30 aa, Eragrostis tef
MAPSAKNRSATMLLIVIVTVVLCSMPTCTQ

SEQ ID NO: 888 - protein, 30 aa, Eragrostis tef
MAPSWKNLSVVLLVLAQMLLVHAWIHAESA

SEQ ID NO: 889 - protein, 29 aa, Eragrostis tef
MEPSREKLSAAVLLLLLALTADMGPRVQA

SEQ ID NO: 890 - protein, 29 aa, Eragrostis tef
MKMVLQPRIVAAASVLILLLLTAGGQVQA

SEQ ID NO: 891 - protein, 22 aa, Eragrostis tef
MKGQTAATAALVVLLLVFGAEA

SEQ ID NO: 892 - protein, 24 aa, Eragrostis tef
MKGGKIAATTTALLLLLLALGAEA

SEQ ID NO: 893 - protein, 33 aa, Eragrostis tef
MAPSQMNLSAVLLVVILLPVVMASARESPSVSA

SEQ ID NO: 894 - protein, 31 aa, Coix lacryma jobi
MALSRRMGAPVLILVLLLVATELGTTKVAEA

SEQ ID NO: 895 - protein, 23 aa, Coix lacryma jobi
MTMKGKIAATTALVLLLLTLCAE

SEQ ID NO: 896 - protein, 23 aa, Eragrostis tef
MTGGKIAATTALLLLLLAFGAEA

SEQ ID NO: 897 - protein, 29 aa, Eragrostis tef
METPRKAVASCLLLCLLLVHSGMTPSVLA

SEQ ID NO: 898 - protein, 4 aa, Coix lacryma jobi
MEAA

SEQ ID NO: 899 - protein, 20 aa, Eragrostis tef
MATMCSMLLILLVLASGCEA

SEQ ID NO: 900 - protein, 32 aa, Coix lacryma jobi
MGLSTKLFVVLLLLLTGYNTETRQLGPVTMAL

SEQ ID NO: 901 - protein, 27 aa, Eragrostis tef
MEPSRGKLSAAILLLLLFVTAAGPVEA

SEQ ID NO: 902 - protein, 10 aa, Stellaria media
EGRIAIRRNW

SEQ ID NO: 903 - protein, 46 aa, Stellaria media
MKSYIAFASILLFILATERGPDGVEGVHFTPPVGRGRGGGYGGKGP

SEQ ID NO: 904 - protein, 29 aa, Eragrostis tef
MEAWRKTAVCSVLLVLLIAASSEVAFVEA

SEQ ID NO: 905 - protein, 48 aa, Eragrostis tef
MAHTSALASLLPLLLMVLLATCAQTDGSEHAFPILRRKPIPPPTPEDA

SEQ ID NO: 906 - protein, 32 aa, Stellaria media
MGKTVLSINVTFLTLLFAVLLLNDVMYAPVEG

SEQ ID NO: 907 - protein, 30 aa, Eragrostis tef
MASSGKNLSATMLLIVIVAAVLCSMPTCTQ

SEQ ID NO: 908 - protein, 27 aa, Eragrostis tef
MASKISTRAVTVIMILELLILLSSVGA

SEQ ID NO: 909 - protein, 29 aa, Arabidopsis lyrata subsp. lyrata
MKSSIQLISTLFFLVILVLAPGMMKMVEG

SEQ ID NO: 910 - protein, 30 aa, Arabidopsis thaliana
MKLSMRLISAVLIMFMIFVATGMGPVTVEA

SEQ ID NO: 911 - protein, 33 aa, Pinus sylvestris
MAGKGVGSRLSTLFLLVLLVITIGMMQVQVAEG

SEQ ID NO: 912 - protein, 25 aa, Petunia hybrida
MARSICFFAVAILALMLFAAYETEA

SEQ ID NO: 913 - protein, 64 aa, Digitaria sanguinalis
HVIARFLQTQPLAILLAACPIFLNAPTSTRKQAMEPAGKNLSAVLLLTALLLVAIAAGESASVG

SEQ ID NO: 914 - protein, 25 aa, Saccharum ravennae
MSMNKKHLVAAFVTLALIMAPYRAT

SEQ ID NO: 915 - protein, 5 aa, Saccharum ravennae
MEAAA

SEQ ID NO: 916 - protein, 27 aa, Saccharum ravennae
MSFYKKLVIVGFVLTLLLVSHRMEAAA

SEQ ID NO: 917 - protein, 26 aa, Saccharum ravennae
MASNKDVVVPAIFVQALLLVAYCAEA

SEQ ID NO: 918 - protein, 29 aa, Euphorbia maculata
MAKLHSYTMLYLFAFLFLIVSTEIPGISA

SEQ ID NO: 919 - protein, 29 aa, Euphorbia maculata
MAKLHSYTMFYVFAFLFLLFSTEIPGISA

SEQ ID NO: 920 - protein, 27 aa, Euphorbia maculata
MKISAGFWLLLLIVLASQDGMVIGSYG

SEQ ID NO: 921 - protein, 34 aa, Foeniculum vulgare
MAQKASALTLSAIFVLFLVASYSVAKGARAAAEG

SEQ ID NO: 922 - protein, 18 aa, Bassia scoparia
MLLIMILLRCAEVEVAEG

SEQ ID NO: 923 - protein, 30 aa, Bassia scoparia
MAKSRSSLNFIAILLLLLVVLNQEMVAVEG

SEQ ID NO: 924 - protein, 27 aa, Bassia scoparia
MDKKCAVLFMMLIIFFASQGMVQKTEA

SEQ ID NO: 925 - protein, 12 aa, Bassia scoparia
MRAGHAQAAWEA

SEQ ID NO: 926 - protein, 8 aa, Bassia scoparia
MGPKRAEA

SEQ ID NO: 927 - protein, 23 aa, Oryza sativa subsp. japonica
MTTMLAIALLMAILFASLSGTEA

SEQ ID NO: 928 - protein, 24 aa, Oryza sativa subsp. japonica
MEAKVATTVLVLLLLTLGGEVAAA

SEQ ID NO: 929 - protein, 29 aa, Medicago truncatula
MAISFNRVHFFIALLCIASILTPGGAIDS

SEQ ID NO: 930 - protein, 29 aa, Medicago truncatula
MARSVPLVSTIFVFLLLLVATGPSMVAEA

SEQ ID NO: 931 - protein, 32 aa, Panicum hallii
MWTRKAAARAAVMLLLLIVVAQEYSPAPAAEA

SEQ ID NO: 932 - protein, 25 aa, Panicum virgatum
MALSRGMVLFFLLLLVAPEIGTIDA

SEQ ID NO: 933 - protein, 23 aa, Panicum virgatum
MNGKIAATTAALCLLLMTCGAEA

SEQ ID NO: 934 - protein, 5 aa, Plantago major
MKVEA

SEQ ID NO: 935 - protein, 27 aa, Portulaca oleracea
MKQSMRLFAALFLVLLLALATENGVEG

SEQ ID NO: 936 - protein, 29 aa, Portulaca oleracea
MAMEKKYLSLLLLAFLLLAFQSNMVEVEA

SEQ ID NO: 937 - protein, 30 aa, Portulaca oleracea
MERSTRVFSALLLMLLLVFATEMGTKVAEA

SEQ ID NO: 938 - protein, 8 aa, Portulaca oleracea
GMVKQTEA

SEQ ID NO: 939 - protein, 27 aa, Raphanus raphanistrum
MKLSLRVVSAILLSFMLLFTSGMGPVE

SEQ ID NO: 940 - protein, 29 aa, Raphanus raphanistrum
MAKFASIIVLLFAALVVFAAFEAPTMVEA

SEQ ID NO: 941 - protein, 29 aa, Raphanus raphanistrum
MAKFASIIALLFAALVLFAAFEAPTMVEA

SEQ ID NO: 942 - protein, 29 aa, Raphanus raphanistrum
MAKFASIVALLFAALVVFAAFEAPTVVEA

SEQ ID NO: 943 - protein, 29 aa, Raphanus raphanistrum
MAKFASIITFLFVVLIIFSAFEEQTMVEG

SEQ ID NO: 944 - protein, 29 aa, Raphanus raphanistrum
MAKFVSIITLLFVALVLFAAFEAPTMVEA

SEQ ID NO: 945 - protein, 10 aa, Rosa blanda
GILASSTDRG

SEQ ID NO: 946 - protein, 27 aa, Rosa blanda
MDRKFLGLVLFFIVLLTSQEMVIRSEA

SEQ ID NO: 947 - protein, 27 aa, Rosa blanda
MEKKFFGLALFFIILLTSQEMVMQSEA

SEQ ID NO: 948 - protein, 32 aa, Sorghum bicolor
MGLSTKLFAVLLLLLIGGYTDTQLGPVTMALA

SEQ ID NO: 949 - protein, 31 aa, Spinacia oleracea
MKMSMRSIAVVFLVCLLVLSTEEMGPRKADA

SEQ ID NO: 950 - protein, 28 aa, Spinacia oleracea
MEKKFFGLLVLLLFFFASEMNMVVEVDG

SEQ ID NO: 951 - protein, 28 aa, Taraxacum officinale
MAKRSVAVYTVLLLVVVLAISEIATVSG

SEQ ID NO: 952 - protein, 13 aa, Taraxacum officinale
MPNNGDNYQIATA

SEQ ID NO: 953 - protein, 30 aa, Zea mays
MSFSKRVAVAGALALALQLILASHLAAAGA

SEQ ID NO: 954 - protein, 33 aa, Zea mays
MSFNKNLAVVVGFTLALLIASNGEETSSYGGSA

SEQ ID NO: 955 - DNA, 249 bp, Arabidopsis lyrata
atgtttaaaatttacctcagtataattgtttttaattacaatgttgtggttttgggagttgtgccagaaaaactaactacatgttctaggttattacctaaaaaacctggaaaatgtgttaaagaagattgtgatcgtatgtgtaagcaaaaatggccaggaaaatatacggttggtcggtgctacccatatacagatgctaagaagtgcctttgtagtgtatgcggcccagacagacaacctccttaa

SEQ ID NO: 956 - DNA, 321 bp, Zea mays
atgtcgttctataagaaactagtgatcgttggtttcgccttaaccttgctccttgtgtcattccgaatggatgcgactgcaaagctttgcagtacgacaatggagagactcatttgcggcggagcaagtcgaggcgacgtgaacagggcatgcgatgaaacgtgcagatccaagggctacacgggtggcggcttttgcaacatgaaaatacaacgctgtgtttgtcgcaagccgtgtgtccaggaggagcaaacagaggcgcgcgccagagacgaagcagccgacgctggagatatgatgagccagacgatggcagattga

SEQ ID NO: 957 - DNA, 240 bp, Ipomoea trifida
atggaacgcttcattaagttgtttgccatcattttcctcttacttgcgctcatttattctgatgctgaaattgagcccatgaaaattggacacggtgggatatgctataaaaataaggttcggcccaagtcgttcaaggggctatgctttgatgaagacaaatgcaagcatgcgtgcgagaatgaaggcttcgctggtggcaaatgcgtgttccctttgtgctgctgctggaggaaatag

SEQ ID NO: 958 - DNA, 225 bp, Abutilon theophrastii S
atgatgaaaaaatcgttggggattttctttctgctccttattgtcttagcctcccaatgggcgctgcagccaactgaggctagggtttgcgagtcgcagagccataagttcaagggtgcatgtgtaagtagccacaactgcgctctggtgtgcaggaacgaaggtttctccggcggaaaatgccgagggttccgtcgccggtgcttctgcactaagctttgctaa

SEQ ID NO: 959 - DNA, 183 bp, Abutilon theophrastii S
atgggttgtaaagctgaggaatgtaaagtatgcgaggctccaagcggtgacttcgaaggttcctgcttcgaggatgcggactgtgcagaagcttgccggtcggaggaaggaaagaattatgattatggagcatgcggaggcgaacccataaaagacaaatgtgtatgctatggtaaatgttaa

SEQ ID NO: 960 - DNA, 237 bp, Ambrosia artemisiifolia R
atgaaatcttccatgaagttatatgcagcgttgttgcttgttgtcatgtgtataatggtcaatgaaatgggtggtccgatggtggtggaagcgaggacatgcctgtcacagagccacaagttcaagggggcgtgcttgagtgacaccaattgtagcaacgtgtgcaaatctgaagggtttcctagaggaaagtgtcgtggttttcgacgtagctgcttctgcgtaaaaagttgttag

SEQ ID NO: 961 - DNA, 252 bp, Ambrosia artemisiifolia S
atgaagtttattattagcatgtttatagtacttttactagttatcggagcatcagcacggatggatgctatgattaataatgaaggtgccgagagcaagacgtacagtagcaaaccagtcacatgtagtgcggatgacaatttaccaggtggtaattgtgattatgataagtgtcaaaagttgtgcaacgaattgcacaggaatcctgcctggggagaatgctctagtgacacaatgtgtttatgtcattga

SEQ ID NO: 962 - DNA, 243 bp, Amaranthus rudis
atgaagcaagcaatgaggccttttgctgctattttccttgtgcttttgcttgtattggccacagagatgggaccaaaagtagcagaagcaagaacatgcacaactccaagtcaaaagttcagaggattatgtgtgagcaagaggaactgtgaaggtgtttgcaatactgaaggatttccaagcggaagttgtgatgggtttcgtagacgatgcatgtgcggcaggccatgcccagcaccttaa

SEQ ID NO: 963 - DNA, 243 bp, Amaranthus rudis
atggagaacaaattctttgggcttttgcttttgattctcgtcgtacttgcttctgagacgagtatggttgaagtggatgcagcgacatgcgcaaaaccaagtatgtactacaaaggtgtttgccgtgacaacccatcatgtgtgagtgcttgtagtcgagagaattggcctattggagtatgcgtcttcaaaggcagctccttcatcaaattcgctgcatgcgaatgtcgaaggccatgctaa

SEQ ID NO: 964 - DNA, 363 bp, Ambrosia trifida
ggatgtcatccatgctttaccaaaattaaggaggttgcaaattataatcattgtgaaaagaaatttttgcttgcgatgacgatgatgatgaaacattcagtttcattacattcatggaccgtaaaagttattatagtcagcctcatcatcacatctgtgatgagagaaactatcggtcgagcaccactagcagcgtcaccaccaccaccatgtaaggctcattgttcatatcaaagcaagaacttcaagggtgtttgcttcaatgcaagtaactgtcgcaatgtttgcctaagtgaaggttcaactactggtgggcattgtaaagctcttaaatgtaggtgtgagaaatgttgtgaaaaataa

SEQ ID NO: 965 - DNA, 237 bp, Ambrosia trifida S
atgaagtcatccatgaagctgtttgcaacgttgtttcttgttgtcatgtgtctaatggccaatgaaatgggcggtccgatcgtggtggaagctagaacatgtcagtcgcaaagccacaagttcaagggggcgtgcttgagtgacaccaactgtggtaacgtgtgcaaatctgaagggtttcctagaggaaagtgtcgtggttttcgacgcaggtgcttctgcgtcaaacactgttag

SEQ ID NO: 966 - DNA, 243 bp, Brachypodium distachyon
atggagtcattgcgcaggttctccgctgccgctgccatccttgcccttctgctgctcctcgtggccaccgaggcggttacagctcaggcgtacgggaagaagtgctcaaagccaagcggccgttttaaggggccatgcttctttaaagtggactgcgaacaacaatgcaagaaggaggggtggccacggggcgtttgcacaggcttcgccggtcgctgtgtatgcaaaaattatggatgctaa

SEQ ID NO: 967 - DNA, 255 bp, Brassica napus
atgaggaaatcccttcaactcttgttcaccttcttaactatcttcatcgttctttcactaggaatgatggtagatgcgcaaaaaaatgaaccaaaagaatgtccttataaactcccaattgacaaaaccaagcgttgtgctccactaaactgtctgaatctatgtaagaagaaatatggacctaccggtagtggtagttgttcagaggaaaagggattttgtaactgcacagctcattgtaagggttctcgttaa

SEQ ID NO: 968 - DNA, 240 bp, Brassica napus
atggctaaaaacaccatctttgctacctttatgatcgttctagttctagggatggtgatggaggacacacaaggagaagaattgtgtcatgaacactttgtacaagaccccgtttgtgtacctcaaaagtgtgccaatcaatgtactgcaaagtggggagcaagacaaggaagaggggcatgtgggggagggccaggaatggccaaagactgtctctgcacttttagctgccaaaactga

SEQ ID NO: 969 - DNA, 282 bp, Brassica napus
atgatggccatggcaactaagtcagtttcttccttcgccatacttttcatcctctttctagttatcatagagttgccggagacaaaagcacaggatagaaaatgtcttcaagaatacggcggcgacgtgggtttccgtttctgtgcgcctctgatatatccgtcgttttgttatcgaagatgccgtgagaacaagggagccaaaggtggaagatgccaatcaggagcggccggcgctggtagtatgaagtgcttatgcgatttctgcagcgacaagccttaa

SEQ ID NO: 970 - DNA, 264 bp, Brassica napus
atgaaaaattattttcgatcttcgcttattggtctcatcatgctcacaattcttctacttggagtaatggcgactgctcagaagggaggaccaataatcccagaaacttgtgttgaaaattacccagacaaagctggaaaatgtgatctcaaccaatgtaaatcccgatgtgccaaaaataggaaaaatgggcaaggtagttgcattgatacaggcaaaggacatatgcaatgccgatgcgcttatccttgccgtcgtccctga

SEQ ID NO: 971 - DNA, 417 bp, Brassica napus
atgggaaaacacacagtgaggttccttgttagagatttgcctgctcctataggtagttctggtggtagcaacggttacttaggcacagcaccaacaccaagtgttcaaccacatcaaaacaaacccaaagtaagacacatagcaaaagtgacaatggcgttgaaaccactttccatctttgttgtcttcttcatcttcttagttatctctgacgtgccagagatagaagcgcaagatagccagtgtttgagggaatacggtggcgatgttggcttcagcttctgtgcgcctcggatattaccgacgttttgttacacaagatgccgtgagaacaagggggctaaaggtggaagatgccgttggggaccaggaactaacgtcaggtgcttatgcgactactgcaacgataaaccctaa

SEQ ID NO: 972 - DNA, 273 bp, Brassica napus
atggcagcaaagaagttctcatttcttcaattacccttcttagtggtgtttgctctcatccttttgcctatgatttcaggacaatattacaaatgtaacaaggacgggtgtacaaacacattggtgtgcgatgcaaaatgcaagtctatggggttccccaaaggaggggtttgtcgagcatatagttatggcggtgcttgttgctgcgaatgcagttctaaagcatgtcaacatcctttcatatccaatcttcatttttatatgattacataa

SEQ ID NO: 973 - DNA, 384 bp, Sorghum bicolor
atggcatccaacaagattgtagcagtgcctggtgtcttcatcctcgccttgctccttgttgcctattgtgcggaggcaacaatctgctcaaggcataatacttcttaccaaggcttatgccggagcaataagaactgtgcgaactcgtgtactcaacatgggcttggcactagcggatactgcaagggcaatgtccgtattttcaaaaaatgcttttgtacctttgaatgccctgggggaggtggagggggagggggagggggaggagaaaatccaccagaggagggagggggagacgaagggggaggaggaaatccgccaagagggggaagggggagacgaaatccgccaagggtcaagccgcattccgacgagcaccagtag

SEQ ID NO: 974 - DNA, 222 bp, Canavalia rosea
atggagaggaaatcacttggactgttcttcttcatcctcattctcctttcttcccaaatggtggtgcagacagagggaagggtgtgcgagtcacagagccacaaattcaaaggtccatgctccggtgaccataactgtgctctggtctgcaggaacgaaggtttctccggtggccagtgcaaaggtttccgccgccgctgcttttgcaccaagctttgttga

SEQ ID NO: 975 - DNA, 237 bp, Canavalia rosea
atggctcgttctatgccgttggtttcaaccatttttgtcttgcttctgcttctagtggccactgagatggagccaacaatggtggctgaagcaagaacttgtgagtctcagagccaccgcttcaagggaccatgtttgagtgacaccaactgtggttctgtttgtcgaactgaacgtttcactgcaggacattgccgtggcttccgtcgcagatgcttctgcaccaaacattgttaa

SEQ ID NO: 976 - DNA, 273 bp, Canavalia rosea
atggccagccgcatctcaatgctttcctttctatttgtcaccctagttctagtttcagcagttgggaacatagtggcggaagcaaaggtatgcacagaacctttgggttcatgcggtaaagcaggggagtgtgaatcgaagtgcgctcacacccacacggatggccaaggaagctgtgacaacttcagactgtgcacgtgcatttacttctgcgcttcaccagcaacaacgaggccatcatggtggatcagccctgggctgggccttaattga

SEQ ID NO: 977 - DNA, 252 bp, Chenopodium album
atgaagatgtcaatgaggtcgattgctgtgattttctttgtgtgcctacttgtcttgtcaacagaagacgcgggtccaagaaaggcagaagctggaatatttagcaggaagaaatgcaaatctccaagtaaaacattcaggggactttgcggaagggacgccaactgtgacaccgcatgtaggtatgaaggttatccagctggaaattgccatggccttcgccgaagatgcatttgttgcacccatgcttaa

SEQ ID NO: 978 - DNA, 225 bp, Chenopodium album
atgaggccttttactgctgtttttctcgtcctcctgcttgtctttgccgcagagatgggaccaagagtagcagaagcaagaacatgtgaaacagcaagccataagttcaaaggagcatgtataagtaaaaggaactgcgaaaatgtctgtcaaactgaaggattttctggtggtgattgtaaaggccttcgtagaagatgcttttgcactaagccctgcgcttaa

SEQ ID NO: 979 - DNA, 240 bp, Conyza canadensis
atgaggccttctatgaagctactagcaacttttttgcttgttgtgatgtgccttatggccaatggaatgggtggtggtccgatggtggcggaagcaaggacatgcgagtcgcaaagccataagtttaagtcggcatgtttgagtgacacaaattgtggaaatgtgtgcaagtccgaggggtttcatggtggaaaatgtcgtggctttagaagaaggtgcttttgtaccaaacattgttag

SEQ ID NO: 980 - DNA, 234 bp, Stellaria media
atggctctatctaagcagatactaatcgtgtttttccttgtcgttgctttaatagccaattcaccctactcagcgtcgggaggtgaggcacctggactcgcatgccccgggtggtcgtgtgtgttcatgacaagtgctcaatgtcttgaagcttgtcacttgagccactacactggttctggtgactgtacagatttgggcggtcctgatttagaatgttgttgcagtttttga

SEQ ID NO: 981 - DNA, 237 bp, Eragrostis tef
atggaggcttggaggaagaccgcgctgtgctctgttctccttgtgctgctcatcgccgccaccagcgaggtggccgttgttgaggccgcggaatgctggaaggaggacaaccaccacacgttctgcttcgacgccgactgcaagctgacctgccaggatcacggcaacgtggacggccgctgcacctgggggaggaccctgtggccctactgcgagtgcctggcttccaactgctga

SEQ ID NO: 982 - DNA, 174 bp, Medicago truncatula
gtacaggcggccggtatttgtgagaggctcagcagaacatggcataggccatgtccatctcgagacactgtaaagtgtgaaaatcactgcatcaataaggaacaagcattttttggttcttgtcagcctgatcatagcttcaaacttgtttgcctctgtttcttcggctgctga

SEQ ID NO: 983 - DNA, 279 bp, Eragrostis tef
atggctccttcagcaaagaatcgctctgcaaccatgctcctaattgtcatcgtgaccgtcgtactatgttcaatgcctacatgcacgcagagtgaatgccaccagtatggagatggttggtgtgaatgccggcacccgagtggcgcttattctggaccgtgccttggccttaccgacggttgcaataagacttgcttatcggaaagctccgagaacatttacggcgagtgtgacaacgactttaaatgctactgctttactaaatgcccttctccctag

SEQ ID NO: 984 - DNA, 303 bp, Eragrostis tef
atggcgccctcatggaagaatctctctgtggtcctcctggtccttgcacaaatgttgctggttcatgcttggatccatgcggagtccgcttccgttggggattatgcttgcagccagcacctgagcggcaattataaaggggcgtgctggtcatggatcaacgacaatgactgcaaacgtgtgtgcattgaggaaagcatcgacaacatttccggcttctgtgcctatttccaatgctggtgccaggacagatgcaagtctgagactgttgctgctgctgctagcgctccgatccggtcatga

SEQ ID NO: 985 - DNA, 261 bp, Eragrostis tef
atggaaccttcgcgcgagaagctctccgccgccgtcctcctcctgctgctggctctaaccgccgacatggggcctcgggttcaggcgggagagtgcttgtcaccgagcaaaaggttccgtgggccgtgcttcagctcccaccgctgcgcgaacgtctgcagggaggaggacaatgggtactccggcggctcctgccgtggactgtactttcaatgcttgtgcatcaggccatgcacgacagcttcggtgcctgagccatga

SEQ ID NO: 986 - DNA, 291 bp, Eragrostis tef
atgaagatggtgctgcagcctcgcatcgtcgccgcagcatccgtcctgatcttgctcctcctgaccgccggtggtcaggttcaggccgacgagtgctccgccgtcagccgcagcaagacgttcgagggcgactgcgaaagcaaggtcgcctgcgtcgatgcctgcaggcgcgagttgtacacagaaggctactgcttcctcgatatcgccgatccggaccaccgcgtctgcatgtgcaccgcaccctgcccaccggcaccggagaaggcggcgcggggaagtttggtttag

SEQ ID NO: 987 - DNA, 303 bp, Eragrostis tef
atgaaggggcagactgcagcaactgctgccttggtcgtgctcctcctcgtcttcggcgccgaggccaagaagtgcggagagtggaactttagcaagtcatacgggtgtatggatgacgcgaactgcgtcaccgcctgcgttgaagaaggctacaacgacggctgctgcagcgaggcatacgcgcggtgcatgtgcagtaagaaatgcggcggcggcagcgtcggcgaagaactggccctcgcgtgcgccagagagccgacggtgttgacggtgagggctctgagagccggaggccatgcgtga

SEQ ID NO: 988 - DNA, 324 bp, Eragrostis tef
atgaagggcggcaagatcgcagctacaacgacggccttgcttctgctcctcctagccttgggcgcggaggccgagctgtgcaaagagcgcagcaggagattcgaaggggaatgctaccacagcatgaactgcgcagctgtttgcgtcacggaggattacaccagcggcttctgcgagggcatggtggccaggagatgcatgtgcactaaggagtgcggcagcgagggcccgcccggcgctggtgacgaggactcgccaccgggtcaagggccaccggcagagttgacgacggccagggcccggagggccggaggccacgtgtga

SEQ ID NO: 989 - DNA, 303 bp, Eragrostis tef
atggcgccttcacagatgaatctctctgccgtcctcctagtcgtcatcctcctacccgtcgtcatggcatcagctcgtgagtcgccgtcggtgtccgctgggaaatttctttgcgacgaacaccagagcggcaattacaaagggccatgctttggattgatcaacgacgctgcctgcaagcgagtatgcttagaagaaagccccgagaacgttgacggtgaatgtaactttttacaatgctggtgccaaagctcatgcacctctgaggctgtagctgctgctagcgctccgatcccgcaatga

SEQ ID NO: 990 - DNA, 243 bp, Coix lacryma jobi
atggcgctgtctcgccgcatgggcgctcccgtcctcatccttgtgctcctcctcgtcgccacagagctggggacgaccaaggtggcggaggcgaggcactgcctgtcgcagagccaccggttcaagggcctgtgcatgagcagcaacaactgcgccaacgtgtgccagaccgagaacttccccggcggcgagtgcaaggcggagggcgccacgcgcaagtgcttctgcaagaagatatgctag

SEQ ID NO: 991 - DNA, 312 bp, Coix lacryma jobi
atgaccatgaagggtaagattgcagcaacgactgccttggtcctcctcctcctgaccttatgtgccgaggccaaggtctgcgagtgggtgagtcccgaggatgttttgtgccaacaatcgacttgtctcccacattgcatcagcaagggctacaccggcggctactgcacccaacttgaccggaagtgcgcgtgcactaaggaatgcacaggtgatgtggtggaggcattggtgggggttgaaactgaaagggcaatcgatcgagttaacgctggacatgcgaagaagatagagctgctcggacatgcttga

SEQ ID NO: 992 - DNA, 333 bp, Eragrostis tef
atgacgggtggcaagatcgcagctacaacggcattgcttctgctcctcctagccttcggcgcggaggctgatatttgcaaagagcatagcaagaccttcaaaggatggtgccatcatgacatgaattgcgccgccgtttgtgtgacggagggctgcggcggcggcttctgccagggcgctattcccagagagtgcatgtgcactaaggaatgtgaacctgctggtggtggtggcggtggtggcggcggtggtggtgacgacccgccaccgggcactggcgggccaccagcagagttgatggcgagggcccggagggccggaggccacgtgtga

SEQ ID NO: 993 - DNA, 252 bp, Eragrostis tef
atggagactccaagaaaagcagtggcttcatgccttctcctttgcctgctcctagtgcattccggcatgacgccgtcggttcttgcgttggacgactgctgggtgccggatcacgtccactacgtcatctgcttccaccaacccaagtgccggagcagctgtcaggatcacggcttcgccgacgggcgatgcgccgggttccccaacctggtgcccatgtgcgagtgcctgcgccccaactgccctgcctga

SEQ ID NO: 994 - DNA, 228 bp, Coix lacryma jobi
atggaggcggctgcaaaaatgtgccggacgagattgccgcaaatacattgcggcggaggaaacagaaccgccacaaatgcagcatgcagtgagacttgcaaggagaagggctacacgggtggcggcttctgcgactacaacaagattccttttgattctgtgtgtatttgtcgccatccttgtgtagcggagcaaaccacagacgccgaaaaactcagcccgcgctga

SEQ ID NO: 995 - DNA, 354 bp, Eragrostis tef
atggcaacgatgtgttccatgctgcttatactgttggtccttgcatcaggttgtgaggctattgttccaaaatatgagtatctgggttgctggaaccaagcagataatcaggtgtcttgcccctggtttaagaaggcaactttatgcaaaaatgagtgcatccaggaaagttacgatgaaggttccggtcaaaaaataaagtacgatgatggaaaatgtggggttgttgttccttcgttcaaggttcattgcatgtgtcacaaacccggctgcaataatccgccggatgtgccgactgatgatgtcttggcaaaaagtagtcagtcggaaaaactttaccgacaccacttataa

SEQ ID NO: 996 - DNA, 243 bp, Coix lacryma jobi
atgggtctatccaccaagctttttgtggtccttctcctgctcctcactggatataatactgagacgcggcagctgggaccagtgactatggcattggcgaggaagtgtgagtcgcggagccaccgcttcaagggaccctgctccagagatgcaaactgcgcgaccgtttgccggacagaaggctttaccagcggcgagtgcaagggcctacgccgccgctgcttctgtaccaaggagtgctag

SEQ ID NO: 997 - DNA, 252 bp, Eragrostis tef
atggagccttcacgaggaaagctttccgcagccatcctcctcctcctgcttttcgttacggccgccgggccggttgaagctggcgactgcttcacgcggagcaccacgttcgacgagttgatttgcttgttcgaagacagctgctttgacgcgtgcatggaggagggcaaagggtacaccggcggcaagtgccgccgcttgaagtgctactgcatcacgccgtgcgcggcgaaggaagcaacttgggcttaa

SEQ ID NO: 998 - DNA, 165 bp, Stellaria media
gaaggaagaatcgctatcagacgtaattgggcggagtgtcccgagacttgcttaaattttgaagatgaagaatgctacaaactttgtcagaaccgtggtcatcccaaaggtggtgattgcataaacaccggggcaccctatgagttttgttgttgtattacctaa

SEQ ID NO: 999 - DNA, 285 bp, Stellaria media
atgaagtcatatattgcttttgcttccattctcttgtttatcctagctaccgaacggggtcccgatggcgtagaaggtgttcattttaccccaccggtaggacgcggacgcggaggaggttatggaggtaagggacccaaaatatgtactgtagagagcaagacatttagtggcaaatgctggagaaaggaatattgcgtattagcgtgtaaatccgaaggttatcatgtcaatggacgctgcggtttgcttaaaagaaaatgtctttgcgactatgtttgttaa

SEQ ID NO: 1000 - DNA, 237 bp, Eragrostis tef
atggaggcttggaggaagaccgcggtgtgctctgttcttcttgtgctgctcatcgccgcctccagcgaggtggcctttgttgaagccgcggaatgctggaaggaggacaaccaccacacgttctgcttcgacgccgactgcaagctgacctgccgggatcacggcaacgtggacggccgctgcacctgggggaggtccctgtggccctactgcgagtgcctggcttccgactgctga

SEQ ID NO: 1001 - DNA, 354 bp, Eragrostis tef
atggctcacacctcagcgttagcatcgctcctcccactcctacttatggtgctcttggccacctgtgctcaaactgatgggagtgaacacgcattcccaatattgcgacgtaagcccataccgccgccaacgccggaggatgcccctcgtccgccctgtactcctagctcaggggcaaaagtccccaatgtgatcaacatcggagcctgtcaaaacgacaatgaaggtgatctccacgccgtctgcattaagcagtgcatggacaaaggctacattggtgggcgttgtgacatcctgctcaatggcctccctggcgactgctcctgcatgaactatctttacggccatccgtag

SEQ ID NO: 1002 - DNA, 249 bp, Stellaria media
atgggaaaaactgtgttgagtatcaatgttactttccttacactcttatttgctgtgctcctcctcaatgatgtcatgtatgcacctgttgaggggaaaatttgcgagaggccaagcggaacatggaagggaatatgtgtgcattcgaacgattgcaacaaccagtgcgttcaatgggagaatgctgggagtggtgcttgccactatcagtttcctaacttcatgtgcttctgttatttcgattgttag

SEQ ID NO: 1003 - DNA, 279 bp, Eragrostis tef
atggcgtcttcaggaaaaaatctctctgcaaccatgctcctaattgtcatcgtggccgccgtactatgttcaatgcctacatgcacacagagtgaatgccaccagtatggcaacggttggtgtgaatgccggcacccgagcggcgcttattctggaccgtgccttggccttaccgacggttgcagtcggacttgcgtatctgaaagctccgagaacatttacggtgaatgtgactacgactttaaatgctactgctttactaaatgcccctctccctag

SEQ ID NO: 1004 - DNA, 312 bp, Eragrostis tef
atggctagcaaaatctccacgcgagctgtgacggtcatcatgattttggagctgctgatccttctgtcttcggttggcgcacagctcgagaagccgtgcggcgtgctcgtcagcgaagatccgctctgcttcgccgcgaaccaggacgcctgcgatacctggtgctaccacaagggattcgacaccggaacctgttatgctggccccaacgacggcgacaaaacttgcatctgcgtcacaccgtgctccaaagaccagaagcaggaggcggctcgagcggcggcggcggcggagatgaccggccggccatga

SEQ ID NO: 1005 - DNA, 246 bp, Arabidopsis lyrata subsp. lyrata
atgaagagctctatccagttaatctctacgcttttcttcttagttatacttgttctcgcaccaggtatgatgaagatggttgaaggacaacaaatgtgcgaaactcaaagcataaactttaggggaatgtgtacgaaatggaggaactgccaacgagtatgtatgagcgaaggttttcctgacggtcgatgcaaaggatttattcgcaaatgcatttgcacgaagccttgtcctgtttctacttaa

SEQ ID NO: 1006 - DNA, 234 bp, Arabidopsis thaliana
atgaagctctctatgcgtttgatctcagctgttctcatcatgttcatgatattcgtcgccactgggatgggaccagtcactgtggaggcacgcacttgtgagtcgcagagccatagattcaagggtacatgcgtgagtgcatcaaactgcgccaacgtgtgccacaacgaaggctttgtcggaggtaactgccgtggattccgtcgtcgttgcttctgcaccagacattgctga

SEQ ID NO: 1007 - DNA, 141 bp, Pisum sativum
aaaacttgtgagcatttggctgatacatacaggggagtatgcttcacgaatgctagctgtgatgatcactgcaagaacaaagcgcacttaatcagtggcacgtgccataactggaaatgtttctgcactcaaaactgttaa

SEQ ID NO: 1008 - DNA, 252 bp, Pinus sylvestris
atggcgggcaagggagttggcagtcgactcagcactctttttctgctcgtgctgcttgttataaccattgggatgatgcaggttcaagttgcagagggccgaatgtgcaaaaccccgagcggcaagttcaaagggtattgtgtgaacaacaccaactgcaaaaatgtttgccgcactgagggatttccaacgggaagttgcgatttccatgtggctggcagaaaatgttactgttacaaaccctgcccttga

SEQ ID NO: 1009 - DNA, 144 bp, Triticum aestivum
aagatctgccggcggcgcagcgccgggttcaaggggccgtgcatgtccaataagaactgcgcgcaagtctgccagcaagaaggctggggcggcggcaactgcgacgggcccttccgccggtgcaagtgcatcaggcagtgctga

SEQ ID NO: 1010 - DNA, 306 bp, Petunia hybrida
atggctcgctccatctgtttcttcgcagttgctatactagcattgatgctctttgctgcctatgagacggaagcgggaacttgcaaggctgaatgcccaacttgggaaggaatatgtatcaataaagccccatgtgtaaaatgttgcaaagcacaaccagaaaaattcaccgacgggcactgcagtaaaatactccgaagatgcctatgcactaagccgtgtgcaactgaagaggcaactgcaactttggctaacgaggtaaagactatggctgaagctttggtcgaagaagatatgatggagtaa

SEQ ID NO: 1011 - DNA, 399 bp, Digitaria sanguinalis
catgtgattgccaggttcctccaaactcaaccgttagcaattctgcttgcggcttgcccaatcttcttgaacgcaccaacttccacgagaaaacaagcaatggagcctgcaggaaaaaatctctctgccgtcctcctactcaccgccctcctacttgtcgccatagccgctggtgaatcggcgtcggttggggactatccttgcaacaatcacctgagtggcagttataaaggggtgtgcctgggtttgattaacgacgccgcctgcgagagtgcatgcctagacgaaagcagcgacaatatatccggcgcctgtgacttttttcagtgctggtgccaaagcagatgccactctgagactgttgatgctgctgctgttagcgctccgatcccagcctga

SEQ ID NO: 1012 - DNA, 282 bp, Saccharum ravennae
atgtccatgaacaagaaacatttggtcgctgccttcgtcaccttggccttgatcatggcgccataccgcgcaacagcagactgcgaatttaggacggggatcaggtgctggtccgacaagatgtgcgtgaccatctgcgtgcaaaagaattgtggcttctccgacggctattgctcccgcttcaggtgcgtatgcgccggacactatagaaccgtcgtgtggggagaagccaacgacggagaaggagaagccggccacggtggcgcccggatgcttaactaa

SEQ ID NO: 1013 - DNA, 207 bp, Saccharum ravennae
atggaggcagctgcaaaaatgtgcaagtcgatattgggcggacacgtatgcggcggcggaatcaaaggcgccgtagacaaggcatgcaatatggtgtgcaaagacaatggctacacgggtggcggctattgcgatatgaaaaagacaaagtgtatttgtagcaagccgtgtgcagcggagacgaagcagccgacgcaggagatatga

SEQ ID NO: 1014 - DNA, 324 bp, Saccharum ravennae
atgtcgttctacaagaaactagtaatcgttggcttcgtcttgaccttgctccttgtgtcacaccgcatggaggcggctgcaaaaatgtgcatcgcgacgccacctcggttaggctcagtatactgcagcacaaactctcaatgcaataaattattgtgcaagtacgagctctacaccagtggctattgcgacatgaagcggaacaggtgtgtttgtagcaagccgtgtgcagtggagcaaacagtagaggcgccgggaaaccagcccgctgcgccggagaagcagccgacgccgctggagataagacagcgttcaagtgattga

SEQ ID NO: 1015 - DNA, 330 bp, Saccharum ravennae
atggcatccaataaggacgtagtggttcctgctatcttcgtccaggccttgctcctcgtggcctattgtgcggaggcaaagatatgcacgaagcctaatccattttaccttagcttatgccgaagcgacaaggactgtggagactcgtgcattcaccatcgcatcggcaccagcgggttctgcaagggcagaagaccgcttaccagagtatgcacatgtaactttgaatgcccagggcgaggaggcaatcttccaggagtcaagctgctatccagcgggcacaagttgtcatctggggatgagccaccatctagcatgcccaaattgaaa

SEQ ID NO: 1016 - DNA, 240 bp, Euphorbia maculata
atggctaagctacattcttataccatgttatatctcttcgccttcctcttccttattgtctccactgagataccaggtataagtgcaaagctctgcgagaggcgaagcaaaacatggaccggattctgcggaagctcgaagaactgtaacaagcaatgcaggaactgggaaggtgcatctcacggagcttgccatgctcaatttccaggggttgcttgcttttgttacttcaattgttaa

SEQ ID NO: 1017 - DNA, 240 bp, Euphorbia maculata
atggctaagctgcattcttataccatgttctacgtctttgccttccttttcctccttttctccactgagataccgggtataagtgcaaaactatgtgagaggagaagcaaaacatggaccggattctgtgggagctcaaagaactgtaacaagcaatgcataaactgggaaggtgcatctcatggagcttgccatgctcaatttccaggggttgcttgcttttgttacttcaaatgttag

SEQ ID NO: 1018 - DNA, 225 bp, Euphorbia maculata
atgaagatatcagctgggttttggttacttttgcttattgtgttagcttctcaagacggtatggtgattgggagctatggaagggtatgcgagtcgcagagccacaagtttaaggggccatgctccggtgatcacaactgcgctatggtttgccgcggcgagggcttttccggcggtaactgccgcggattccgccgcagatgcttttgcaccaggcattgttag

SEQ ID NO: 1019 - DNA, 276 bp, Foeniculum vulgare
atggcacagaaagctagcgctctcaccttgtctgccatcttcgttctcttccttgtagctagctactcagtagcaaagggagccagagctgccgcagagggagaagttgtgtacccagaagcactgtgtgagaaaccaagccaaacatggtcaggaaagtgcgggaacacaaagaactgtgacaaccagtgcattcaatgggagactgcacgccacggagcttgtcacaagcgcggtggcaagtggatgtgcttctgctacttcgacaagtgttaa

SEQ ID NO: 1020 - DNA, 261 bp, Bassia scoparia
atgttactaataatgattttattgcgttgtgcagaagtggaagtggccgaaggtgtgaagtactgcaaggaatacagtgagaattggagtggatattgtgggaatagtaagaagtgtgattcagtttgcaggaagaaagagagtgcacacagtgggacttgccactgggatggcttgggaagggcgtgcttttgctacttcaagtgtggcgcagcagcagcagctgatcatcctgttcataaccgcaaacttgtcaattaa

SEQ ID NO: 1021 - DNA, 249 bp, Bassia scoparia
atggcaaagtctcgttcctcccttaacttcattgcaatccttctcctactcttagttgttcttaaccaagaaatggtggcagtggagggaaaaacatgctcgaagcggagcgaaaagttttccgggccgtgcttcagcagcaggaactgcgcgattcaatgcaaggacgagctggatgacaagaaggacgtagatgggaactgtcgctggggttggggaaaatattgcaagtgctactacaaatgctga

SEQ ID NO: 1022 - DNA, 228 bp, Bassia scoparia
atggacaagaaatgtgccgtattgttcatgatgttgatcatcttctttgcttcgcaaggaatggtgcaaaaaactgaggcaaggacttgtgagtcacagagtcacgactttaggggaacttgtgtgaggaaccacaactgcgccatggtctgccgaaacgaaggcggcttcaccggtggccattgccgtggcccaactcgcaagtgtttttgcactcgaccatgctag

SEQ ID NO: 1023 - DNA, 354 bp, Bassia scoparia
atgcgtgcagggcatgcgcaggccgcatgggaggcgcgtgcggtggtgcgtgccacacctcccatgcgcgtgcgctcactttcggttctggaatggagggggctctctgcaggcaagtgtagtggcacgtgcagaggtgcagatggtcagaagaggcgcatgcagtggcgtgtgccactccttcgatgcgcgtgtgctcacttttgcttctgcctcaacctgctcaactgcttcaacaggaagggccataacttcgcgctcggtgctcggaatgcagcttataatataccatttgaaagccctcggagtctactttccaatgacaaaaatcgcacctgcaaatgcaaagtttga

SEQ ID NO: 1024 - DNA, 175 bp, Bassia scoparia
atgggtccaaaaagggcagaagccttgttcgggaaagggcactgcaaatatcctagtaagctctttaaaggactatgtacaagggacaccaactgcgacaccgtctgcaagagggagggatatcctgccggaaactgccacggccttcgcagaagatgtctttgctgttctagac

SEQ ID NO: 1025 - DNA, 321 bp, Oryza sativa subsp. japonica
atgaccaccatgcttgccattgccttactcatggccatcctcttcgcctcactctccggcacagaagctatcatctgcaaagcaaggagcaagatgtaccgcgggaagtgcaggggcaacagaaactgcgccatgatctgcgtccacgaggagtacaccggcggctactgctccaagggcgtcttctccaagtgcatgtgcaccaagcggtgtggcggcggcggcggtggcggcggaggaggaggaggcggcggcggcgatgagccgccgttgcgtgaggcccgtgtccaccgctcgtcgccgccgttggagcccaagtga

SEQ ID NO: 1026 - DNA, 258 bp, Oryza sativa subsp. japonica
atggaggcaaaggttgcaaccactgtgttagtcttgctcctcctcacccttggtggtgaggtggctgctgccaagatgtgccatgatcgtagccaaaccttcaaagggatgtgcttccggacctccaactgcaacaccagctgcaccaacgagggctacaccggcggccactgcacaaccttcagacgtcgatgcgtgtgcaccaaggagtgtggaggggacagcccgccgggtgatccgccgccggcgagggcctga

SEQ ID NO: 1027 - DNA, 222 bp, Medicago truncatula
atggctattagcttcaaccgtgtgcatttttttattgcattgctatgcattgcatctattttgactccaggaggagcaattgattcagcatctccatggatttattgcattggcaaaggtccatgtccaaataaggatcaagattgtgccaattattgtgcaaaaagtaagtttcctaagggtggcaagtgtattgcaagctattgttgttgcaatggataa

SEQ ID NO: 1028 - DNA, 375 bp, Triticum aestivum
atgccgtctgcgcggccggcggtcctgctggtcgcggccgtgtgggtgctcctgtcggcggctggcgcgctggcggacggaggcaatggcacggtgtgcctgtgcacgggcccgcagtgcgtgccgccgtgccccgtcccggggacgccaccgacgacgtcgcccacgcagttccccttctgcccgcagcggccgccggcggtcgggcccttcccgtgggagcagcagccgccggcgtcgccgaggtcggggtcggggttccctcaggacgcgggcttcctcgctgcagccgcggcgagccccactagcccagcggcggcatggctcgcggtggccgccttgtgctctgctttcctgctgcttctgccgcagtga

SEQ ID NO: 1029 - DNA, 231 bp, Medicago truncatula
atggctcgttcagttcctttggtttccaccatctttgtcttccttctgcttcttgtggccactgggccaagtatggtggcagaagcaagaacttgtgagtcacaaagtcacaaattcaaagggccatgtgctagtgatcacaactgtgcttctgtgtgccaaacagaacgtttctctggaggacgctgccgtggattccgtcgtagatgcttttgcactacacattgttaa

SEQ ID NO: 1030 - DNA, 240 bp, Panicum hallii
atgtggacgaggaaggcggcggcgcgggcggccgtcatgctcctgctgctcatcgtcgtcgcacaggagtactcgccggcgccggcggcggaggcgcgcgtgtgccggcggcggagcgcggggttccggggggcctgcatgtccgaccacaactgcgcgcaggtgtgcctccaggagggctggggcggcggcaactgcgacgggttcaggcggcagtgcaagtgcgtcaggcagtgctag

SEQ ID NO: 1031 - DNA, 306 bp, Panicum virgatum
atggcgctgtctcgtggcatggtcctcttcttcctgctcctcctcgtcgcaccagagatagggacgatcgatgccaagaagaaatcaaagtttgccaagaagactgcaaagtccgtaacgaaggataaggaggaggagaagaaggaggaggagaagaaccactgcctgtcgcagagccaccacttcaaaggcttctgtttgagtagcgacacctgcgccgaggtgtgccagaaggagggcttccatggcggcgagtgcaagctgcataatgccatgcgcaagtgcttttgcaagaagccttgttag

SEQ ID NO: 1032 - DNA, 369 bp, Panicum virgatum
atgaatgggaagatcgcagcgacgaccgctgccctgtgcttgctcctcatgacctgtggtgcggaggccatgctgtgcaaaacgcgaagcacgaccttcaaagggatttgcaggcagaatatgaattgcgccaacatctgtgtctcagagggcagaagcggcggatactgtaaaggatttccgatgttcaagcactgcatgtgcacttttgactgcagcagtgacggaggcggtggtgacggaggcggtggtggcagtggcagtggcggtggaggtggcggtggcagcagcggcggtggagcgccggtgccaccaaggccgccgccagcattgacggcgagggctcgaagggccggaagccctgcatga

SEQ ID NO: 1033 - DNA, 330 bp, Plantago major
atgaaggtagaagcaacaatgtgcgagtccaaaagtcaaaagttcaaaggtttatgcttcagtgatgataattgttctacaatatgcaaaaaggaaggatttttatttggtaaatgcaagggacttcgcacgcggtgcatatgttacaagaattgttcaaatggtggagctagcgaagatggaggtgccggtggaagtgacaactctggcagctactcagatggtggtgctggtggcatgggaagcaccggcagctactcagatggtggttctggtggcaggggcagcttcggcagctactcagatggatctacttctagccatgcttag

SEQ ID NO: 1034 - DNA, 228 bp, Portulaca oleracea
atgaagcaatcaatgaggctctttgctgccctctttcttgtactcttgcttgccttggccactgagaatggagtagagggaagaacatgtgacagcccaagtcaaaagttcaggggaatatgtgcgagtaacaggaactgcggcaacgtttgccaaactgaaggatttccatctggacattgccatggcattcgtagaagatgcatgtgtagcaggccttgtgcctaa

SEQ ID NO: 1035 - DNA, 234 bp, Portulaca oleracea
atggccatggaaaagaagtacttgagcctattgttgctggcatttctcttacttgcattccagagcaacatggttgaagtagaagcgggaacatgcgcaaagccgagcaagtactacaaaggattctgttatcagggctgccctgagacttgtcagagggagaattggccatacggtgtgtgcgtggccaaaggacccctttggatggcttgcgagtgtcgcagaccttgctag

SEQ ID NO: 1036 - DNA, 234 bp, Portulaca oleracea
atggagcgatcaacccgtgttttctctgctcttctactcatgctcctccttgtcttcgctacagaaatggggacaaaggtagcagaggcgaggacatgcgagtcaaggagccacaggttcaagggaatttgtgtgagcagaaccaactgtgccaacgtctgcaaaactgagggcttccccggtggtcgctgccgtggattccgccgccgttgctactgcctcaagcactgttga

SEQ ID NO: 1037 - DNA, 168 bp, Portulaca oleracea
ggaatggtgaagcagacagaggcaaggatgtgcgagtcgaaaagtcaccatttccgaggtccgtgtgtaagggatcacaactgtgccatggtgtgcaggactgagggattctccggtggccactgcaggggtttccgcatgcgctgctactgcactaatcgttgctag

SEQ ID NO: 1038 - DNA, 222 bp, Raphanus raphanistrum
atgaagctctctctgcgtgtggtgtcagccattctcctctcgttcatgctcctctttacttcaggaatgggtccagtggaatcaaaaccgtgtgaggcacggagtaaaacgttccaaggagtgtgtctcaacggacagaaatgtgcctctgcttgtaccaaagaaggttccacaggcggtcgttgcagtagtctccgttgctcctgcaccagaccctgctag

SEQ ID NO: 1039 - DNA, 243 bp, Raphanus raphanistrum
atggctaagtttgcttccatcattgtccttctcttcgctgctcttgtcgtttttgctgctttcgaagcaccaacaatggtggaagcacagaagttgtgtcagaggccaagtgggacatggtcaggagtctgtggaaataataacgcatgcaagaatcagtgcattcgacttgagaaagcacgacatgggtcttgcaactatgtcttcccagctcacaagtgtatctgttatttcccttgttaa

SEQ ID NO: 1040 - DNA, 243 bp, Raphanus raphanistrum
atggctaagtttgcgtccatcatcgcacttctttttgctgctcttgttctttttgctgctttcgaagcaccaacaatggtggaagcacagaagttgtgcgaaaggccaagtgggacatggtcaggagtctgtggaaacaataacgcatgcaagaatcagtgcattaaccttgagaaagcacgacatggatcttgcaactatgtcttcccagctcacaagtgtatctgctactttccttgttaa

SEQ ID NO: 1041 - DNA, 240 bp, Raphanus raphanistrum
atggctaagtttgcttctatcgtcgcccttctcttcgctgctcttgttgtctttgctgcttttgaagcaccaacagtggtggaagcaaagttgtgcgagaggtcaagtggaacatggtcaggagtctgtggaaacaataacgcatgcaagaatcagtgcattcgacttgaaggagcacaacatggatcttgcaactatgtgttccctgctcacaagtgtatctgctatttcccatgttaa

SEQ ID NO: 1042 - DNA, 240 bp, Raphanus raphanistrum
atggctaagtttgcttccatcatcaccttcctcttcgttgttctaattatcttttctgcttttgaagaacaaacgatggtggaagggcagaagacatgcaagaggaagcctgggtcagggacaaaaacttgtatgaaggatgatcattgcaggttttgcatcacaaacgagaaagcaatacgtggtacttgcgattataaattccctctacgccagtgttactgccactttccatgttaa

SEQ ID NO: 1043 - DNA, 243 bp, Raphanus raphanistrum
atggccaagtttgtttccatcatcacccttcttttcgttgctcttgtactctttgctgcttttgaagcaccaacaatggtggaagcgcagaagttgtgcgagaggtctagtgggacatggtcaggagtatgtggaaataataatgcttgcaagaaccagtgcatcaacctcgagggagcacgacatggatcttgcaactatattttcccatatcacaggtgtatctgctacttcccatgttaa

SEQ ID NO: 1044 - DNA, 201 bp, Rosa blanda
ggaatcttggcatcctcaactgaccgcggtcgtgcacacgcgataaggatccccgagcactcatgccataagcagattgagtcaagcaaatgtgagctccagaaatgcattcaggaatgctccaaagaaccatctggcgcaggagcgtgcaaaaataccatttgcttttgcacatactattgcaaggatcctccaaattga

SEQ ID NO: 1045 - DNA, 228 bp, Rosa blanda
atggacaggaaattcttagggcttgttctgttcttcatcgtcctcctgacttctcaagagatggtgattcgcagcgaagcgaggatatgtcaagtcccgagcaaaacattcaaggggctttgcgtcaaggacaggaactgtgtcgtgagatgtcacagtgagggttacggttacggcaaatgctcccatgtccgacgacagtgtatgtgcttgaagccttgcgactaa

SEQ ID NO: 1046 - DNA, 225 bp, Rosa blanda
atggagaagaagttctttgggctcgctttgttcttcatcatcctcctgacttctcaagaaatggtgatgcaaagtgaagcaatgatttgcaaagtccctagcaaaactttcaaagggctgtgcttcagtcacaagaactgtattgtgagatgtcacagtgagggttacggttggggcaaatgctctcatatccgacgactgtgcatgtgctacaagccttgctaa

SEQ ID NO: 1047 - DNA, 240 bp, Sorghum bicolor
atgggtctctccaccaaactttttgcggtcctcctcctgctcctcattggtggttatactgatacgcagctgggaccggtgactatggcactggcgaggaagtgtgagtcgccgagccaccgcttccagggaccctgctccagagacgcaaactgcgcaaccgtttgccggactgaaggttttaccggtggcaagtgcaaaggcctacgccaccgctgcttctgtaccaaggactgctag

SEQ ID NO: 1048 - DNA, 252 bp, Spinacia oleracea
atgaagatgtcaatgaggtcgattgctgtggttttccttgtgtgcctacttgtcttgtcaacagaagaaatgggtccaagaaaggcagacgctggatttttcagctcgaagaaatgcaaaacaccaagtaaaacattcaggggaccttgtgtaaggaacgccaactgtgacacttcttgtaggtatgagggatatccagctggagattgcaagggtattcgtagaagatgtatttgttgtacacatgcttaa

SEQ ID NO: 1049 - DNA, 234 bp, Spinacia oleracea
atggagaagaaattctttgggcttttggttttgcttctcttcttctttgcttctgagatgaacatggtggttgaagttgatggtgccacatgtgcaaaaccaagtaagttcttcaaaggtggttgtttttccgttatttctgattcggcttgtaggaaggcttgtagccaagagaattggcctatcggaatttgtgtagctgttttcagatgtgaatgtcgaaggacttgttaa

SEQ ID NO: 1050 - DNA, 414 bp, Taraxacum officinale
atggcaaaaagatcagttgctgtctacacagtccttctgcttgtcgtcgttcttgccatatcagaaatcgcgacagtgagcggaaaattatgtgaaaaaagcagccaaacgtattctggaggttgtaaaggcaaaaagtgtgacaaaaagtgcataaaatgggagaaggcacttcacggagcttgtcacaagcgtgaagggaaaaaagcttgcttctgctacttcgattgtaaaaagaagccaaaggatgcaaaacctgctcctccggatgctgcaactacccctcctccccctcctcccgatgctggtggtggtggtggtggtgatgctggtggtggtggtggtggtggtggtgatgctggtggtgcccctcctgctgacggtggtggttcccctcctcctgcccgacactaa

SEQ ID NO: 1051 - DNA, 345 bp, Taraxacum officinale
atgcccaataacggtgacaattatcaaatcgcgactgcaaaattatgtgaaaaaacaagccaaactttttccggattttgtatgaacgataaatgtgacaaaaagtgcatagaatgggagaaagcactccatggagcttgtcacgcgagatctttgatgcatcgaatatgcttctgctattttgactgtgccaagaagcctccaaatgcgacacccgctcctcctggagccctaccacctcctctaacacctcctagcgatggcggaaaagctcctcctgatggcggttctcctcctcctgccgatggtggtggtggcggtggtggtggtggtggtggtcgatga

SEQ ID NO: 1052 - DNA, 314 bp, Zea mays
atgtcgttcagcaagcgagtagctgtggccggcgccctcgccttggccctgcagcttatcctggcttcacatcttgcagcagctggagccaaaaaagacgaaacaatagcaccgttacagacgtgcgagaccatgatcaaggtcccctgctggggcaaaaacgcgatctgcatccccatctgcatcgcgatgcgctacaccggcggtttctgcgacgtcgccacctgcatgtgcaccaagcaatgcctcgccgccgccgaggctgaggcagatggggcatcgcagcaggccgtggcgacaccgcggctgaatga

SEQ ID NO: 1053 - DNA, 318 bp, Zea mays
atgtcgttcaacaaaaacctagcagtggtcgttggcttcaccttggctctgctcatcgcgtcgaacggtgaagaaacttcctcgtatggcggatcagcgctgtgcgattcaacgacgggggtcgcctgcgcatccgacgcggtctgcgtgaccatctgcaagcgaagggctggacagaactacgtctacggccactgctacaaggagcctagcggcggccgttcgtgcttgtgcaccgtacggtgtgatccacggtcggcggcggcgccggcgccggcgccggcgccggcttggcgcgggatcggaatgctaggctga

SEQ ID NO: 1054 - protein, 82 aa, Arabidopsis lyrata
MFKIYLSIIVFNYNVVVLGVVPEKLTTCSRLLPKKPGKCVKEDCDRMCKQKWPGKYTVGRCYPYTDAKKCLCSVCGPDRQPP

SEQ ID NO: 1055 - protein, 106 aa, Zea mays
MSFYKKLVIVGFALTLLLVSFRMDATAKLCSTTMERLICGGASRGDVNRACDETCRSKGYTGGGFCNMKIQRCVCRKPCVQEEQTEARARDEAADAGDMMSQTMAD

SEQ ID NO: 1056 - protein, 79 aa, Ipomoea trifida
MERFIKLFAIIFLLLALIYSDAEIEPMKIGHGGICYKNKVRPKSFKGLCFDEDKCKHACENEGFAGGKCVFPLCCCWRK

SEQ ID NO: 1057 - protein, 74 aa, Abutilon theophrastii S
MMKKSLGIFFLLLIVLASQWALQPTEARVCESQSHKFKGACVSSHNCALVCRNEGFSGGKCRGFRRRCFCTKLC

SEQ ID NO: 1058 - protein, 60 aa, Abutilon theophrastii S
MGCKAEECKVCEAPSGDFEGSCFEDADCAEACRSEEGKNYDYGACGGEPIKDKCVCYGKC

SEQ ID NO: 1059 - protein, 78 aa, Ambrosia artemisiifolia R
MKSSMKLYAALLLVVMCIMVNEMGGPMVVEARTCLSQSHKFKGACLSDTNCSNVCKSEGFPRGKCRGFRRSCFCVKSC

SEQ ID NO: 1060 - protein, 83 aa, Ambrosia artemisiifolia S
MKFIISMFIVLLLVIGASARMDAMINNEGAESKTYSSKPVTCSADDNLPGGNCDYDKCQKLCNELHRNPAWGECSSDTMCLCH

SEQ ID NO: 1061 - protein, 80 aa, Amaranthus rudis
MKQAMRPFAAIFLVLLLVLATEMGPKVAEARTCTTPSQKFRGLCVSKRNCEGVCNTEGFPSGSCDGFRRRCMCGRPCPAP

SEQ ID NO: 1062 - protein, 80 aa, Amaranthus rudis
MENKFFGLLLLILVVLASETSMVEVDAATCAKPSMYYKGVCRDNPSCVSACSRENWPIGVCVFKGSSFIKFAACECRRPC

SEQ ID NO: 1063 - protein, 120 aa, Ambrosia trifida
GCHPCFTKIKEVANYNHCEKKFLLAMTMMMKHSVSLHSWTVKVIIVSLIITSVMRETIGRAPLAASPPPPCKAHCSYQSKNFKGVCFNASNCRNVCLSEGSTTGGHCKALKCRCEKCCEK

SEQ ID NO: 1064 - protein, 78 aa, Ambrosia trifida S
MKSSMKLFATLFLVVMCLMANEMGGPIVVEARTCQSQSHKFKGACLSDTNCGNVCKSEGFPRGKCRGFRRRCFCVKHC

SEQ ID NO: 1065 - protein, 80 aa, Brachypodium distachyon
MESLRRFSAAAAILALLLLLVATEAVTAQAYGKKCSKPSGRFKGPCFFKVDCEQQCKKEGWPRGVCTGFAGRCVCKNYGC

SEQ ID NO: 1066 - protein, 84 aa, Brassica napus
MRKSLQLLFTFLTIFIVLSLGMMVDAQKNEPKECPYKLPIDKTKRCAPLNCLNLCKKKYGPTGSGSCSEEKGFCNCTAHCKGSR

SEQ ID NO: 1067 - protein, 79 aa, Brassica napus
MAKNTIFATFMIVLVLGMVMEDTQGEELCHEHFVQDPVCVPQKCANQCTAKWGARQGRGACGGGPGMAKDCLCTFSCQN

SEQ ID NO: 1068 - protein, 93 aa, Brassica napus
MMAMATKSVSSFAILFILFLVIIELPETKAQDRKCLQEYGGDVGFRFCAPLIYPSFCYRRCRENKGAKGGRCQSGAAGAGSMKCLCDFCSDKP

SEQ ID NO: 1069 - protein, 87 aa, Brassica napus
MKNYFRSSLIGLIMLTILLLGVMATAQKGGPIIPETCVENYPDKAGKCDLNQCKSRCAKNRKNGQGSCIDTGKGHMQCRCAYPCRRP

SEQ ID NO: 1070 - protein, 138 aa, Brassica napus
MGKHTVRFLVRDLPAPIGSSGGSNGYLGTAPTPSVQPHQNKPKVRHIAKVTMALKPLSIFVVFFIFLVISDVPEIEAQDSQCLREYGGDVGFSFCAPRILPTFCYTRCRENKGAKGGRCRWGPGTNVRCLCDYCNDKP

SEQ ID NO: 1071 - protein, 90 aa, Brassica napus
MAAKKFSFLQLPFLVVFALILLPMISGQYYKCNKDGCTNTLVCDAKCKSMGFPKGGVCRAYSYGGACCCECSSKACQHPFISNLHFYMIT

SEQ ID NO: 1072 - protein, 127 aa, Sorghum bicolor
MASNKIVAVPGVFILALLLVAYCAEATICSRHNTSYQGLCRSNKNCANSCTQHGLGTSGYCKGNVRIFKKCFCTFECPGGGGGGGGGGGENPPEEGGGDEGGGGNPPRGGRGRRNPPRVKPHSDEHQ

SEQ ID NO: 1073 - protein, 73 aa, Canavalia rosea
MERKSLGLFFFILILLSSQMVVQTEGRVCESQSHKFKGPCSGDHNCALVCRNEGFSGGQCKGFRRRCFCTKLC

SEQ ID NO: 1074 - protein, 78 aa, Canavalia rosea
MARSMPLVSTIFVLLLLLVATEMEPTMVAEARTCESQSHRFKGPCLSDTNCGSVCRTERFTAGHCRGFRRRCFCTKHC

SEQ ID NO: 1075 - protein, 90 aa, Canavalia rosea
MASRISMLSFLFVTLVLVSAVGNIVAEAKVCTEPLGSCGKAGECESKCAHTHTDGQGSCDNFRLCTCIYFCASPATTRPSWWISPGLGLN

SEQ ID NO: 1076 - protein, 83 aa, Chenopodium album
MKMSMRSIAVIFFVCLLVLSTEDAGPRKAEAGIFSRKKCKSPSKTFRGLCGRDANCDTACRYEGYPAGNCHGLRRRCICCTHA

SEQ ID NO: 1077 - protein, 74 aa, Chenopodium album
MRPFTAVFLVLLLVFAAEMGPRVAEARTCETASHKFKGACISKRNCENVCQTEGFSGGDCKGLRRRCFCTKPCA

SEQ ID NO: 1078 - protein, 79 aa, Conyza canadensis
MRPSMKLLATFLLVVMCLMANGMGGGPMVAEARTCESQSHKFKSACLSDTNCGNVCKSEGFHGGKCRGFRRRCFCTKHC

SEQ ID NO: 1079 - protein, 77 aa, Stellaria media
MALSKQILIVFFLVVALIANSPYSASGGEAPGLACPGWSCVFMTSAQCLEACHLSHYTGSGDCTDLGGPDLECCCSF

SEQ ID NO: 1080 - protein, 78 aa, Eragrostis tef
MEAWRKTALCSVLLVLLIAATSEVAVVEAAECWKEDNHHTFCFDADCKLTCQDHGNVDGRCTWGRTLWPYCECLASNC

SEQ ID NO: 1081 - protein, 57 aa, Medicago truncatula
VQAAGICERLSRTWHRPCPSRDTVKCENHCINKEQAFFGSCQPDHSFKLVCLCFFGC

SEQ ID NO: 1082 - protein, 92 aa, Eragrostis tef
MAPSAKNRSATMLLIVIVTVVLCSMPTCTQSECHQYGDGWCECRHPSGAYSGPCLGLTDGCNKTCLSESSENIYGECDNDFKCYCFTKCPSP

SEQ ID NO: 1083 - protein, 100 aa, Eragrostis tef
MAPSWKNLSVVLLVLAQMLLVHAWIHAESASVGDYACSQHLSGNYKGACWSWINDNDCKRVCIEESIDNISGFCAYFQCWCQDRCKSETVAAAASAPIRS

SEQ ID NO: 1084 - protein, 86 aa, Eragrostis tef
MEPSREKLSAAVLLLLLALTADMGPRVQAGECLSPSKRFRGPCFSSHRCANVCREEDNGYSGGSCRGLYFQCLCIRPCTTASVPEP

SEQ ID NO: 1085 - protein, 96 aa, Eragrostis tef
MKMVLQPRIVAAASVLILLLLTAGGQVQADECSAVSRSKTFEGDCESKVACVDACRRELYTEGYCFLDIADPDHRVCMCTAPCPPAPEKAARGSLV

SEQ ID NO: 1086 - protein, 100 aa, Eragrostis tef
MKGQTAATAALVVLLLVFGAEAKKCGEWNFSKSYGCMDDANCVTACVEEGYNDGCCSEAYARCMCSKKCGGGSVGEELALACAREPTVLTVRALRAGGHA

SEQ ID NO: 1087 - protein, 107 aa, Eragrostis tef
MKGGKIAATTTALLLLLLALGAEAELCKERSRRFEGECYHSMNCAAVCVTEDYTSGFCEGMVARRCMCTKECGSEGPPGAGDEDSPPGQGPPAELTTARARRAGGHV

SEQ ID NO: 1088 - protein, 100 aa, Eragrostis tef
MAPSQMNLSAVLLVVILLPVVMASARESPSVSAGKFLCDEHQSGNYKGPCFGLINDAACKRVCLEESPENVDGECNFLQCWCQSSCTSEAVAAASAPIPQ

SEQ ID NO: 1089 - protein, 80 aa, Coix lacryma jobi
MALSRRMGAPVLILVLLLVATELGTTKVAEARHCLSQSHRFKGLCMSSNNCANVCQTENFPGGECKAEGATRKCFCKKIC

SEQ ID NO: 1090 - protein, 103 aa, Coix lacryma jobi
MTMKGKIAATTALVLLLLTLCAEAKVCEWVSPEDVLCQQSTCLPHCISKGYTGGYCTQLDRKCACTKECTGDVVEALVGVETERAIDRVNAGHAKKIELLGHA

SEQ ID NO: 1091 - protein, 110 aa, Eragrostis tef
MTGGKIAATTALLLLLLAFGAEADICKEHSKTFKGWCHHDMNCAAVCVTEGCGGGFCQGAIPRECMCTKECEPAGGGGGGGGGGGDDPPPGTGGPPAELMARARRAGGHV

SEQ ID NO: 1092 - protein, 83 aa, Eragrostis tef
METPRKAVASCLLLCLLLVHSGMTPSVLALDDCWVPDHVHYVICFHQPKCRSSCQDHGFADGRCAGFPNLVPMCECLRPNCPA

SEQ ID NO: 1093 - protein, 75 aa, Coix lacryma jobi
MEAAAKMCRTRLPQIHCGGGNRTATNAACSETCKEKGYTGGGFCDYNKIPFDSVCICRHPCVAEQTTDAEKLSPR

SEQ ID NO: 1094 - protein, 117 aa, Eragrostis tef
MATMCSMLLILLVLASGCEAIVPKYEYLGCWNQADNQVSCPWFKKATLCKNECIQESYDEGSGQKIKYDDGKCGVVVPSFKVHCMCHKPGCNNPPDVPTDDVLAKSSQSEKLYRHHL

SEQ ID NO: 1095 - protein, 80 aa, Coix lacryma jobi
MGLSTKLFVVLLLLLTGYNTETRQLGPVTMALARKCESRSHRFKGPCSRDANCATVCRTEGFTSGECKGLRRRCFCTKEC

SEQ ID NO: 1096 - protein, 83 aa, Eragrostis tef
MEPSRGKLSAAILLLLLFVTAAGPVEAGDCFTRSTTFDELICLFEDSCFDACMEEGKGYTGGKCRRLKCYCITPCAAKEATWA

SEQ ID NO: 1097 - protein, 54 aa, Stellaria media
EGRIAIRRNWAECPETCLNFEDEECYKLCQNRGHPKGGDCINTGAPYEFCCCIT

SEQ ID NO: 1098 - protein, 94 aa, Stellaria media
MKSYIAFASILLFILATERGPDGVEGVHFTPPVGRGRGGGYGGKGPKICTVESKTFSGKCWRKEYCVLACKSEGYHVNGRCGLLKRKCLCDYVC

SEQ ID NO: 1099 - protein, 78 aa, Eragrostis tef
MEAWRKTAVCSVLLVLLIAASSEVAFVEAAECWKEDNHHTFCFDADCKLTCRDHGNVDGRCTWGRSLWPYCECLASDC

SEQ ID NO: 1100 - protein, 117 aa, Eragrostis tef
MAHTSALASLLPLLLMVLLATCAQTDGSEHAFPILRRKPIPPPTPEDAPRPPCTPSSGAKVPNVINIGACQNDNEGDLHAVCIKQCMDKGYIGGRCDILLNGLPGDCSCMNYLYGHP

SEQ ID NO: 1101 - protein, 82 aa, Stellaria media
MGKTVLSINVTFLTLLFAVLLLNDVMYAPVEGKICERPSGTWKGICVHSNDCNNQCVQWENAGSGACHYQFPNFMCFCYFDC

SEQ ID NO: 1102 - protein, 92 aa, Eragrostis tef
MASSGKNLSATMLLIVIVAAVLCSMPTCTQSECHQYGNGWCECRHPSGAYSGPCLGLTDGCSRTCVSESSENIYGECDYDFKCYCFTKCPSP

SEQ ID NO: 1103 - protein, 103 aa, Eragrostis tef
MASKISTRAVTVIMILELLILLSSVGAQLEKPCGVLVSEDPLCFAANQDACDTWCYHKGFDTGTCYAGPNDGDKTCICVTPCSKDQKQEAARAAAAAEMTGRP

SEQ ID NO: 1104 - protein, 81 aa, Arabidopsis lyrata subsp. lyrata
MKSSIQLISTLFFLVILVLAPGMMKMVEGQQMCETQSINFRGMCTKWRNCQRVCMSEGFPDGRCKGFIRKCICTKPCPVST

SEQ ID NO: 1105 - protein, 77 aa, Arabidopsis thaliana
MKLSMRLISAVLIMFMIFVATGMGPVTVEARTCESQSHRFKGTCVSASNCANVCHNEGFVGGNCRGFRRRCFCTRHC

SEQ ID NO: 1106 - protein, 46 aa, Pisum sativum
KTCEHLADTYRGVCFTNASCDDHCKNKAHLISGTCHNWKCFCTQNC

SEQ ID NO: 1107 - protein, 83 aa, Pinus sylvestris
MAGKGVGSRLSTLFLLVLLVITIGMMQVQVAEGRMCKTPSGKFKGYCVNNTNCKNVCRTEGFPTGSCDFHVAGRKCYCYKPCP

SEQ ID NO: 1108 - protein, 47 aa, Triticum aestivum
KICRRRSAGFKGPCMSNKNCAQVCQQEGWGGGNCDGPFRRCKCIRQC

SEQ ID NO: 1109 - protein, 101 aa, Petunia hybrida
MARSICFFAVAILALMLFAAYETEAGTCKAECPTWEGICINKAPCVKCCKAQPEKFTDGHCSKILRRCLCTKPCATEEATATLANEVKTMAEALVEEDMME

SEQ ID NO: 1110 - protein, 132 aa, Digitaria sanguinalis
HVIARFLQTQPLAILLAACPIFLNAPTSTRKQAMEPAGKNLSAVLLLTALLLVAIAAGESASVGDYPCNNHLSGSYKGVCLGLINDAACESACLDESSDNISGACDFFQCWCQSRCHSETVDAAAVSAPIPA

SEQ ID NO: 1111 - protein, 93 aa, Saccharum ravennae
MSMNKKHLVAAFVTLALIMAPYRATADCEFRTGIRCWSDKMCVTICVQKNCGFSDGYCSRFRCVCAGHYRTVVWGEANDGEGEAGHGGARMLN

SEQ ID NO: 1112 - protein, 68 aa, Saccharum ravennae
MEAAAKMCKSILGGHVCGGGIKGAVDKACNMVCKDNGYTGGGYCDMKKTKCICSKPCAAETKQPTQEI

SEQ ID NO: 1113 - protein, 107 aa, Saccharum ravennae
MSFYKKLVIVGFVLTLLLVSHRMEAAAKMCIATPPRLGSVYCSTNSQCNKLLCKYELYTSGYCDMKRNRCVCSKPCAVEQTVEAPGNQPAAPEKQPTPLEIRQRSSD

SEQ ID NO: 1114 - protein, 110 aa, Saccharum ravennae
MASNKDVVVPAIFVQALLLVAYCAEAKICTKPNPFYLSLCRSDKDCGDSCIHHRIGTSGFCKGRRPLTRVCTCNFECPGRGGNLPGVKLLSSGHKLSSGDEPPSSMPKLK

SEQ ID NO: 1115 - protein, 79 aa, Euphorbia maculata
MAKLHSYTMLYLFAFLFLIVSTEIPGISAKLCERRSKTWTGFCGSSKNCNKQCRNWEGASHGACHAQFPGVACFCYFNC

SEQ ID NO: 1116 - protein, 79 aa, Euphorbia maculata
MAKLHSYTMFYVFAFLFLLFSTEIPGISAKLCERRSKTWTGFCGSSKNCNKQCINWEGASHGACHAQFPGVACFCYFKC

SEQ ID NO: 1117 - protein, 74 aa, Euphorbia maculata
MKISAGFWLLLLIVLASQDGMVIGSYGRVCESQSHKFKGPCSGDHNCAMVCRGEGFSGGNCRGFRRRCFCTRHC

SEQ ID NO: 1118 - protein, 91 aa, Foeniculum vulgare
MAQKASALTLSAIFVLFLVASYSVAKGARAAAEGEVVYPEALCEKPSQTWSGKCGNTKNCDNQCIQWETARHGACHKRGGKWMCFCYFDKC

SEQ ID NO: 1119 - protein, 86 aa, Bassia scoparia
MLLIMILLRCAEVEVAEGVKYCKEYSENWSGYCGNSKKCDSVCRKKESAHSGTCHWDGLGRACFCYFKCGAAAAADHPVHNRKLVN

SEQ ID NO: 1120 - protein, 82 aa, Bassia scoparia
MAKSRSSLNFIAILLLLLVVLNQEMVAVEGKTCSKRSEKFSGPCFSSRNCAIQCKDELDDKKDVDGNCRWGWGKYCKCYYKC

SEQ ID NO: 1121 - protein, 75 aa, Bassia scoparia
MDKKCAVLFMMLIIFFASQGMVQKTEARTCESQSHDFRGTCVRNHNCAMVCRNEGGFTGGHCRGPTRKCFCTRPC

SEQ ID NO: 1122 - protein, 117 aa, Bassia scoparia
MRAGHAQAAWEARAVVRATPPMRVRSLSVLEWRGLSAGKCSGTCRGADGQKRRMQWRVPLLRCACAHFCFCLNLLNCFNRKGHNFALGARNAAYNIPFESPRSLLSNDKNRTCKCKV

SEQ ID NO: 1123 - protein, 58 aa, Bassia scoparia
MGPKRAEALFGKGHCKYPSKLFKGLCTRDTNCDTVCKREGYPAGNCHGLRRRCLCCSR

SEQ ID NO: 1124 - protein, 106 aa, Oryza sativa subsp. japonica
MTTMLAIALLMAILFASLSGTEAIICKARSKMYRGKCRGNRNCAMICVHEEYTGGYCSKGVFSKCMCTKRCGGGGGGGGGGGGGGGDEPPLREARVHRSSPPLEPK

SEQ ID NO: 1125 - protein, 85 aa, Oryza sativa subsp. japonica
MEAKVATTVLVLLLLTLGGEVAAAKMCHDRSQTFKGMCFRTSNCNTSCTNEGYTGGHCTTFRRRCVCTKECGGDSPPGDPPPARA

SEQ ID NO: 1126 - protein, 73 aa, Medicago truncatula
MAISFNRVHFFIALLCIASILTPGGAIDSASPWIYCIGKGPCPNKDQDCANYCAKSKFPKGGKCIASYCCCNG

SEQ ID NO: 1127 - protein, 124 aa, Triticum aestivum
MPSARPAVLLVAAVWVLLSAAGALADGGNGTVCLCTGPQCVPPCPVPGTPPTTSPTQFPFCPQRPPAVGPFPWEQQPPASPRSGSGFPQDAGFLAAAAASPTSPAAAWLAVAALCSAFLLLLPQ

SEQ ID NO: 1128 - protein, 76 aa, Medicago truncatula
MARSVPLVSTIFVFLLLLVATGPSMVAEARTCESQSHKFKGPCASDHNCASVCQTERFSGGRCRGFRRRCFCTTHC

SEQ ID NO: 1129 - protein, 79 aa, Panicum hallii
MWTRKAAARAAVMLLLLIVVAQEYSPAPAAEARVCRRRSAGFRGACMSDHNCAQVCLQEGWGGGNCDGFRRQCKCVRQC

SEQ ID NO: 1130 - protein, 101 aa, Panicum virgatum
MALSRGMVLFFLLLLVAPEIGTIDAKKKSKFAKKTAKSVTKDKEEEKKEEEKNHCLSQSHHFKGFCLSSDTCAEVCQKEGFHGGECKLHNAMRKCFCKKPC

SEQ ID NO: 1131 - protein, 122 aa, Panicum virgatum
MNGKIAATTAALCLLLMTCGAEAMLCKTRSTTFKGICRQNMNCANICVSEGRSGGYCKGFPMFKHCMCTFDCSSDGGGGDGGGGGSGSGGGGGGGSSGGGAPVPPRPPPALTARARRAGSPA

SEQ ID NO: 1132 - protein, 109 aa, Plantago major
MKVEATMCESKSQKFKGLCFSDDNCSTICKKEGFLFGKCKGLRTRCICYKNCSNGGASEDGGAGGSDNSGSYSDGGAGGMGSTGSYSDGGSGGRGSFGSYSDGSTSSHA

SEQ ID NO: 1133 - protein, 75 aa, Portulaca oleracea
MKQSMRLFAALFLVLLLALATENGVEGRTCDSPSQKFRGICASNRNCGNVCQTEGFPSGHCHGIRRRCMCSRPCA

SEQ ID NO: 1134 - protein, 77 aa, Portulaca oleracea
MAMEKKYLSLLLLAFLLLAFQSNMVEVEAGTCAKPSKYYKGFCYQGCPETCQRENWPYGVCVAKGPLWMACECRRPC

SEQ ID NO: 1135 - protein, 77 aa, Portulaca oleracea
MERSTRVFSALLLMLLLVFATEMGTKVAEARTCESRSHRFKGICVSRTNCANVCKTEGFPGGRCRGFRRRCYCLKHC

SEQ ID NO: 1136 - protein, 55 aa, Portulaca oleracea
GMVKQTEARMCESKSHHFRGPCVRDHNCAMVCRTEGFSGGHCRGFRMRCYCTNRC

SEQ ID NO: 1137 - protein, 73 aa, Raphanus raphanistrum
MKLSLRVVSAILLSFMLLFTSGMGPVESKPCEARSKTFQGVCLNGQKCASACTKEGSTGGRCSSLRCSCTRPC

SEQ ID NO: 1138 - protein, 80 aa, Raphanus raphanistrum
MAKFASIIVLLFAALVVFAAFEAPTMVEAQKLCQRPSGTWSGVCGNNNACKNQCIRLEKARHGSCNYVFPAHKCICYFPC

SEQ ID NO: 1139 - protein, 80 aa, Raphanus raphanistrum
MAKFASIIALLFAALVLFAAFEAPTMVEAQKLCERPSGTWSGVCGNNNACKNQCINLEKARHGSCNYVFPAHKCICYFPC

SEQ ID NO: 1140 - protein, 79 aa, Raphanus raphanistrum
MAKFASIVALLFAALVVFAAFEAPTVVEAKLCERSSGTWSGVCGNNNACKNQCIRLEGAQHGSCNYVFPAHKCICYFPC

SEQ ID NO: 1141 - protein, 79 aa, Raphanus raphanistrum
MAKFASIITFLFVVLIIFSAFEEQTMVEGQKTCKRKPGSGTKTCMKDDHCRFCITNEKAIRGTCDYKFPLRQCYCHFPC

SEQ ID NO: 1142 - protein, 80 aa, Raphanus raphanistrum
MAKFVSIITLLFVALVLFAAFEAPTMVEAQKLCERSSGTWSGVCGNNNACKNQCINLEGARHGSCNYIFPYHRCICYFPC

SEQ ID NO: 1143 - protein, 66 aa, Rosa blanda
GILASSTDRGRAHAIRIPEHSCHKQIESSKCELQKCIQECSKEPSGAGACKNTICFCTYYCKDPPN

SEQ ID NO: 1144 - protein, 75 aa, Rosa blanda
MDRKFLGLVLFFIVLLTSQEMVIRSEARICQVPSKTFKGLCVKDRNCVVRCHSEGYGYGKCSHVRRQCMCLKPCD

SEQ ID NO: 1145 - protein, 74 aa, Rosa blanda
MEKKFFGLALFFIILLTSQEMVMQSEAMICKVPSKTFKGLCFSHKNCIVRCHSEGYGWGKCSHIRRLCMCYKPC

SEQ ID NO: 1146 - protein, 79 aa, Sorghum bicolor
MGLSTKLFAVLLLLLIGGYTDTQLGPVTMALARKCESPSHRFQGPCSRDANCATVCRTEGFTGGKCKGLRHRCFCTKDC

SEQ ID NO: 1147 - protein, 83 aa, Spinacia oleracea
MKMSMRSIAVVFLVCLLVLSTEEMGPRKADAGFFSSKKCKTPSKTFRGPCVRNANCDTSCRYEGYPAGDCKGIRRRCICCTHA

SEQ ID NO: 1148 - protein, 77 aa, Spinacia oleracea
MEKKFFGLLVLLLFFFASEMNMVVEVDGATCAKPSKFFKGGCFSVISDSACRKACSQENWPIGICVAVFRCECRRTC

SEQ ID NO: 1149 - protein, 137 aa, Taraxacum officinale
MAKRSVAVYTVLLLVVVLAISEIATVSGKLCEKSSQTYSGGCKGKKCDKKCIKWEKALHGACHKREGKKACFCYFDCKKKPKDAKPAPPDAATTPPPPPPDAGGGGGGDAGGGGGGGGDAGGAPPADGGGSPPPARH

SEQ ID NO: 1150 - protein, 114 aa, Taraxacum officinale
MPNNGDNYQIATAKLCEKTSQTFSGFCMNDKCDKKCIEWEKALHGACHARSLMHRICFCYFDCAKKPPNATPAPPGALPPPLTPPSDGGKAPPDGGSPPPADGGGGGGGGGGGR

SEQ ID NO: 1151 - protein, 104 aa, Zea mays
MSFSKRVAVAGALALALQLILASHLAAAGAKKDETIAPLQTCETMIKVPCWGKNAICIPICIAMRYTGGFCDVATCMCTKQCLAAAEAEADGASQQAVATPRLN

SEQ ID NO: 1152 - protein, 105 aa, Zea mays
MSFNKNLAVVVGFTLALLIASNGEETSSYGGSALCDSTTGVACASDAVCVTICKRRAGQNYVYGHCYKEPSGGRSCLCTVRCDPRSAAAPAPAPAPAWRGIGMLG

SEQ ID NO: 1153 - DNA, 144 bp, Medicago truncatula
cgcacttgcgagagccagtctcacaagttcaagggcccatgcgcgtcggaccacaactgcgcgtcagtctgtcagactgagcgcttcagtggtgggcgctgccggggattccgccgtcggtgcttttgcacgacacattgttag

SEQ ID NO: 1154 - protein, 47 aa, Medicago truncatula
RTCESQSHKFKGPCASDHNCASVCQTERFSGGRCRGFRRRCFCTTHC

SEQ ID NO: 1155 - DNA, 432 bp, Artificial Sequence
  synthetic
atggcgctgtctcgccgcatgggcgctcccgtcctcatccttgtgctcctcctcgtcgccacagagctggggacgaccaaggtggcggaggcgaggcactgcctgtcgcagagccaccggttcaagggcctgtgcatgagcagcaacaactgcgccaacgtgtgccagaccgagaacttccccggcggcgagtgcaaggcggagggcgccacgcgcaagtgcttctgcaagaagatatgcggagggaaggcaggtaaaaaagcaccaaaagcgacatgcgcaaaaccaagtatgtactacaaaggtgtttgccgtgacaacccatcatgtgtgagtgcttgtagtcgagagaattggcctattggagtatgcgtcttcaaaggcagctccttcatcaaattcgctgcatgcgaatgtcgaaggccatgctag

SEQ ID NO: 1156 - protein, 143 aa, Artificial Sequence
  synthetic
MALSRRMGAPVLILVLLLVATELGTTKVAEARHCLSQSHRFKGLCMSSNNCANVCQTENFPGGECKAEGATRKCFCKKICGGKAGKKAPKATCAKPSMYYKGVCRDNPSCVSACSRENWPIGVCVFKGSSFIKFAACECRRPC

SEQ ID NO: 1157 - DNA, 249 bp, Artificial Sequence
  synthetic
atggcgggcaagggcgtgggcagccgcctcagcacactgttcctgctcgtgctgctcgtgatcaccattggcatgatgcaagtgcaagtggccgagggccggatgtgcaagacgcccagcggaaagttcaagggatactgcgtgaacaacacgaactgcaagaatgtgtgccgtacggagggtttccctacaggaagctgcgacttccacgtagcgggccgcaagtgttactgctacaagccttgctga

SEQ ID NO: 1158 - DNA, 816 bp, Artificial Sequence
  synthetic
agtacaatcatacaagagcaatatatatatttttggttattgaaatttaaatatcatcttcacaaaatgaaaaagcacaaaaagtattaattaatatcatgttttgagactcctttttaccaagaatataaatttcacacctaagaaaattctgaactaggaaaataaccagcatacaattaaggaataagaaaatgcaattacgataaacacttgtcacaaattgtttaataagtcactatccaatcaattatcaaaagtaagatattgccacgtggcaaccagtattttcatcaccttatcaaaagataagcaaaagaaccacatcaaagccacaaaatgccaaccacagatggataaggaaaatccaaccaaccacatgtaatcccacacctcatcaccttatccacacctctgtctatatatataaacacacacttcgtaaccactcatcactcaccacaaacagagaatatctcatctcttcttagcaaacaaagcggaccgcaggtttattcttctctctctatcctctctcttctgatctcgatttgtttttttcgaatcgctctacttccagttagattcttgatttgagattaattagattgattattctaatcgttttttttgtaagcaattaagatttatcttgttttatgtttttctttaggtatgacttgttatgtatgtcactgtttcagatctgatcctctctgttggtttgtgaattctcttgtattgttctaatcactgtttctgaatttgattcgggtttttattgaattctttttatgtgttttggtatttgcaggt
